(19) United States
(12) Patent Application Publication
(10) Pub. No.: US 2015/0071923 A1
(43) Pub. Date: Mar. 12, 2015

(54) MODIFIED ANTI-EPIDERMAL GROWTH FACTOR RECEPTOR ANTIBODIES AND METHODS OF USE THEREOF

(71) Applicants: Ge Wei, San Diego, CA (US); Gregory I. Frost, Del Mar, CA (US); H. Michael Shepard, San Diego, CA (US); Christopher D. Thanos, Tiburon, CA (US)

(72) Inventors: Ge Wei, San Diego, CA (US); Gregory I. Frost, Del Mar, CA (US); H. Michael Shepard, San Diego, CA (US); Christopher D. Thanos, Tiburon, CA (US)

(21) Appl. No.: 14/485,620

(22) Filed: Sep. 12, 2014

Related U.S. Application Data
(60) Provisional application No. 61/960,253, filed on Sep. 12, 2013.

(51) Int. Cl. C07K 16/28; A61K 47/48; C07K 16/30

(52) U.S. Cl. CPC C07K 16/2863; C07K 16/30; C07K 16/3015; A61K 47/48384; A61K 47/48669; A61K 47/48584; C07K 2317/56; C07K 2317/24; C07K 2317/76; C07K 2317/55; C07K 2317/54; C07K 2317/622; C07K 2317/624; C07K 2317/626; C07K 2317/51; C07K 2317/515; C07K 2317/92
USPC 424/133.1; 530/387.3; 530/391.1; 530/391.7; 530/391.3; 530/391.9; 536/23.53; 424/178.1; 435/320.1; 435/69.6; 435/328

(57) ABSTRACT

Provided herein are modified anti-EGFR antibodies and nucleic acid molecules encoding modified anti-EGFR antibodies. Also provided are methods of treatment and uses using modified anti-EGFR antibodies.

### RELATED APPLICATIONS

[0001] Benefit of priority is claimed to U.S. Provisional Application Ser. No. 61/960,253, entitled “MODIFIED ANTI-EPIDERMAL GROWTH FACTOR RECEPTOR ANTIBODIES AND METHODS OF USE THEREOF,” filed Sep. 12, 2013.

[0002] This application is related to International PCT Application No. [Attorney Dkt. No. 33320-3118PC], filed the same day herewith, entitled “MODIFIED ANTI-EPIDERMAL GROWTH FACTOR RECEPTOR ANTIBODIES AND METHODS OF USE THEREOF,” which claims priority to U.S. Provisional Application Ser. No. 61/960,253.

[0003] This application also is related to U.S. application Ser. No. 13/815,553, filed Mar. 8, 2013, entitled “CONDITIONALLY ACTIVE ANTI-EPIDERMAL GROWTH FACTOR RECEPTOR ANTIBODIES AND METHODS OF USE THEREOF,” which claims priority to U.S. Provisional Application Ser. No. 61/685,089, entitled “CONDITIONALLY ACTIVE ANTI-EPIDERMAL GROWTH FACTOR RECEPTOR ANTIBODIES AND METHODS OF USE THEREOF,” filed Mar. 12, 2012.

[0004] This application also is related to International PCT Application Serial No. PCT/US13/30055, filed Mar. 8, 2013, entitled “CONDITIONALLY ACTIVE ANTI-EPIDERMAL GROWTH FACTOR RECEPTOR ANTIBODIES AND METHODS OF USE THEREOF,” which claims priority to U.S. Provisional Application Ser. No. 61/685,089, entitled “CONDITIONALLY ACTIVE ANTI-EPIDERMAL GROWTH FACTOR RECEPTOR ANTIBODIES AND METHODS OF USE THEREOF,” filed Mar. 12, 2012.

[0005] This application also is related to U.S. application Ser. No. 13/200,666, filed Sep. 27, 2011, entitled “METHODS FOR ASSESSING AND IDENTIFYING OR EVOLVING CONDITIONALLY ACTIVE THERAPEUTIC PROTEINS,” which is a continuation-in-part of International Application No. PCT/US11/50891, filed on Sep. 8, 2011, entitled “METHODS FOR ASSESSING AND IDENTIFYING OR EVOLVING CONDITIONALLY ACTIVE THERAPEUTIC PROTEINS,” which claims priority to U.S. Provisional Application Ser. No. 61/402,979, entitled “METHODS FOR ASSESSING AND IDENTIFYING OR EVOLVING CONDITIONALLY ACTIVE THERAPEUTIC PROTEINS AND CONDITIONALLY ACTIVE THERAPEUTIC PROTEINS,” filed Sep. 8, 2010.

[0006] The subject matter of each of the above-noted applications is incorporated by reference in its entirety.

### INCORPORATION BY REFERENCE OF SEQUENCE LISTING FILED ELECTRONICALLY

[0007] An electronic version of the Sequence Listing is filed herewith, the contents of which are incorporated by reference in their entirety. The electronic file was created on Sep. 12, 2014, is 744 kilobytes in size, and is titled 3118seq001.txt.

### FIELD OF THE INVENTION

[0008] Provided herein are modified, conditionally active anti-EGFR antibodies and nucleic acid molecules encoding modified, conditionally active anti-EGFR antibodies.

### BACKGROUND

[0009] Anti-EGFR antibodies are used in the clinical setting to treat and diagnose human diseases, for example cancer. For example, exemplary therapeutic antibodies include Cetuximab. Cetuximab is approved for the treatment of recurrent or metastatic head and neck cancer, colorectal cancer and other diseases and conditions. It can also be used in the treatment of other diseases or conditions involving overexpression of EGFR or aberrant signaling or activation of EGFR. Administered anti-EGFR antibodies can bind to EGFR in healthy cells and tissue. This limits the dosages that can be administered. Hence, Cetuximab and other anti-EGFR antibodies exhibit limitations when administered to patients. Accordingly, it is among the objects herein to provide improved anti-EGFR antibodies that exhibit increased EGFR binding activity in a tumor microenvironment compared to in a non-tumor environment.

### SUMMARY

[0010] Provided herein are modified anti-epidermal growth factor receptor (EGFR) antibodies, and antigen-binding fragments thereof. In particular, the antibodies and antigen binding fragments thereof include an amino acid replacement compared to the anti-EGFR antibody cetuximab or antigen-binding fragment thereof and other cetuximab variants and antigen-binding fragments. The antibodies contain an amino acid replacement in the variable heavy chain corresponding to replacement with glutamic acid (E) at the position corresponding to position 104 with reference to amino acid positions set forth in SEQ ID NO: 2 or 7. The modified anti-EGFR antibodies provided herein specifically bind to EGFR antigen (e.g., human EGFR) and soluble fragments thereof and exhibit greater activity (binding affinity) under conditions of acidic pH, such as is present in a tumor microenvironment, than under conditions of neutral pH, such as exists in non-tumor tissue, such as that which exists in the basal layer of the skin, which has a neutral pH of a about 7 to 7.2. Hence provided are modified cetuximab antibodies and fragments thereof that contain the amino acid replacement glutamic acid at a position corresponding to position 104. These include cetuximab, and modified variants of cetuximab and fragments thereof that contain additional modifications.

[0011] Anti-EGFR antibodies are employed as anti-tumor therapeutics because they bind to EGFR receptors and inhibit ligand binding, thereby preventing EGFR-mediated activities that occur upon ligand binding. As a result, such antibodies can inhibit or treat tumors. Because tissues, other than tumors, such as tissues in the skin, also express EGFRs, the anti-EGFR antibodies also inhibit activities of these receptors, thereby causing undesirable side-effects. The antibodies provided herein exhibit pH-selective binding activity, such that EGFR binding activity is reduced at neutral pH (e.g., pH 7.0 to 7.4) compared to antibodies that do not exhibit pH-selective binding activity and/or compared to EGFR binding activity under acidic pH conditions. By virtue of the pH-selective activity, the anti-EGFR antibodies provided produce fewer or lesser undesirable side-effects and/or exhibit improved efficacy in a treated subject by virtue of the ability to administer higher doses.

[0012] For example, provided herein are modified anti-EGFR antibodies, and antigen-binding fragments thereof, that contain an amino acid replacement(s) in a variable heavy chain of an unmodified anti-EGFR antibody, or antigen-binding fragment thereof, corresponding to replacement with glutamic acid (E) at a position corresponding to position 104 with reference to amino acid positions set forth in SEQ ID NO: 2 or 7, as long as the modified anti-EGFR antibody specifically binds epidermal growth factor receptor (EGFR) or a soluble fragment thereof; the unmodified anti-EGFR antibody is cetuximab, an antigen-binding fragment thereof or a variant thereof, specifically binds to EGFR and does not already contain the amino acid replacement; and corresponding amino acid positions are identified by alignment of the variable heavy chain of the antibody with the variable heavy chain set forth in SEQ ID NO: 2 or 7.

[0013] In any of such examples of the modified anti-EGFR antibodies provided herein, the unmodified anti-EGFR antibody, or antigen-binding fragment thereof, to which the amino acid replacement is made contains a variable heavy chain set forth in SEQ ID NO: 2 or 7, or a sequence of amino acids that exhibits at least 70% sequence identity to SEQ ID NO: 2 or 7; and a variable light chain set forth in SEQ ID NO: 4, 9 or 11 or a sequence of amino acids that exhibits at least 70% sequence identity to SEQ ID NO: 4, 9 or 11. For example, the unmodified anti-EGFR antibody, or antigen-binding fragment thereof, contains a variable heavy chain that exhibits at least 75%, 76%, 77%, 78%, 79%, 80%, 81%, 82%, 83%, 84%, 85%, 86%, 87%, 88%, 89%, 90%, 91%, 92%, 93%, 94%, 95%, 96%, 97%, 98%, 99% sequence identity to the amino acid sequence set forth in SEQ ID NO: 2 or 7; and/or a variable light chain that exhibits at least 75%, 76%, 77%, 78%, 79%, 80%, 81%, 82%, 83%, 84%, 85%, 86%, 87%, 88%, 89%, 90%, 91%, 92%, 93%, 94%, 95%, 96%, 97%, 98%, 99% sequence identity to the amino acid sequence set forth in SEQ ID NO: 4, 9 or 11.

[0014] For example, the unmodified anti-EGFR antibody, or antigen-binding fragment, in which the glutamic acid substitution is made, contains a variable heavy chain set forth in SEQ ID NO: 2 and a variable light chain set forth in SEQ ID NO: 4. In some alternatives, the unmodified antibody, or antigen-binding fragment thereof, contains a variable heavy chain set forth in SEQ ID NO: 7 and a variable light chain set forth in SEQ ID NO: 9 or 11.

[0015] In any of the above examples, the unmodified anti-EGFR antibody provided to which the amino acid replacement is made is a humanized variant of cetuximab. In such examples, the humanized unmodified cetuximab can have a variable heavy chain set forth in SEQ ID NO: 14 and variable light chain set forth in SEQ ID NO: 15; or can have a variable heavy chain set forth in SEQ ID NO: 16 and a variable light chain set forth in SEQ ID NO: 17.

[0016] The modified anti-EGFR antibody, or antigen-binding fragment thereof, of any of the above examples can have a variable heavy chain that exhibits at least 70%, 75%, 76%, 77%, 78%, 79%, 80%, 81%, 82%, 83%, 84%, 85% sequence identity to SEQ ID NO: 2 or 7.

[0017] Any of the modified anti-EGFR antibodies, or antigen-binding fragments thereof, provided herein can be a full-length antibody, or can be an antigen-binding fragment selected from among a Fab, Fab′, F(ab′)₂, single-chain Fv (scFv), Fv, dsFv, diabody, Fd and Fd′ fragment. In some particular examples, the antigen-binding fragment is a Fab or scFv.

[0018] Included among modified anti-EGFR antibody, or antigen-binding fragment thereof, provided herein is a modified anti-EGFR antibody, or antigen-binding fragment thereof, that has a variable heavy (VH) chain with the sequence of amino acids set forth in SEQ ID NO: 74 or 75, or a sequence of amino acids that exhibits at least 85% sequence identity to SEQ ID NO: 74 or 75; and a variable light (VL) chain containing the sequence of amino acids set forth in SEQ ID NO: 4, 9 or 11, or a sequence of amino acids that exhibits at least 85%, sequence identity to SEQ ID NO: 4, 9 or 11. For example, the unmodified cetuximab antibody, or antigen-binding fragment thereof, has a variable heavy chain set forth in SEQ ID NO: 2 and a variable light chain set forth in SEQ ID NO: 4, and is modified to generate a modified anti-EGFR antibody, or antigen-binding fragment thereof, with a variable heavy (VH) chain containing the sequence of amino acids set forth in SEQ ID NO: 75, or a sequence of amino acids that exhibits at least 85%, sequence identity to SEQ ID NO: 75; and a variable light (VL) chain containing the sequence of amino acids set forth in SEQ ID NO: 4, or a sequence of amino acids that exhibits at least 85%, sequence identity to SEQ ID NO: 4. In other examples, an unmodified cetuximab antibody, or antigen-binding fragment thereof, the unmodified anti-EGFR antibody has a variable heavy chain set forth in SEQ ID NO: 7 and a variable light chain set forth in SEQ ID NO: 9, and the modified anti-EGFR antibody, or antigen-binding fragment thereof has a variable heavy (VH) chain containing the sequence of amino acids set forth in SEQ ID NO: 74, or a sequence of amino acids that exhibits at least 85%, sequence identity to SEQ ID NO: 74 and a variable light (VL) chain containing the sequence of amino acids set forth in SEQ ID NO: 9, or a sequence of amino acids that exhibits at least 85% sequence identity to SEQ ID NO: 9. In other examples, the unmodified cetuximab antibody, or antigen-binding fragment thereof, has a variable heavy chain set forth in SEQ ID NO: 7 and a variable light chain set forth in SEQ ID NO: 11 and the modified anti-EGFR antibody or antigen-binding fragment thereof has a variable heavy (VH) chain containing the sequence of amino acids set forth in SEQ ID NO: 74, or a sequence of amino acids that exhibits at least 85%, sequence identity to SEQ ID NO: 74; and a variable light (VL) chain containing the sequence of amino acids set forth in SEQ ID NO: 11, or a sequence of amino acids that exhibits at least 85% sequence identity to SEQ ID NO: 11.

[0019] In any of the examples herein, the modified anti-EGFR antibody, or antigen-binding fragment thereof, is a full-length IgG antibody that has a heavy chain variable domain set forth in either SEQ ID NO: 74 or 75 and a heavy chain constant region set forth in amino acids 120-449 of SEQ ID NO: 72, or a variant thereof that exhibits at least 85% sequence identity to amino acids 120-449 of SEQ ID NO: 72; and a light chain variable domain set forth in any of SEQ ID NOS: 4, 9 or 11 and a constant region set forth in amino acids 108-213 of SEQ ID NO: 3 or 10 or a variant thereof that exhibits at least 85% sequence identity thereto or a constant region set forth in amino acids 108-214 of SEQ ID NO: 8 or 13, or a variant thereof that exhibits at least 85% sequence identity thereto. For example, the full-length heavy chain has the sequence set forth in SEQ ID NO: 72, or a variant thereof that exhibits at least 85% sequence identity thereto, and a full-length light chain set forth in any of SEQ ID NOS: 3, 8, 10 or 13, or a variant thereof that exhibits at least 85% sequence identity thereto.

[0020] Any of the modified anti-EGFR antibodies, or antigen-binding fragments thereof, provided can contain one or more additional amino acid replacement(s) in the variable heavy chain, compared to the unmodified antibody. Non-limiting examples of additional modifications correspond to amino acid replacement(s) T023K, T023H, T023R, T023A, T023C, T023E, T023G, T023I, T023M, T023N, T023P, T023S, T023V, T023W, T023L, V024R, V024A, V024F, V024G, V024I, V024M, V024P, V024S, V024T, V024L, V024E, S025H, S025R, S025A, S025C, S025D, S025E, S025F, S025G, S025I, S025M, S025P, S025Q, S025T, S025V, S025L, G026H, G026R, G026D, G026F, G026M, G026N, G026P, G026Q, G026S, G026Y, G026L, F027H, F027R, F027A, F027D, F027E, F027G, F027M, F027P, F027Q, F027S, F027T, F027V, F027W, F027Y, F027L, S028K, S028H, S028R, S028A, S028D, S0281, S028M, S028P, S028Q, S028V, S028W, S028L, S028C, L029K, L029H, L029A, L029D, L029G, L029I, L029M, L029N, L029S, L029V, T030H, T030R, T030D, T030G, T030I, T030M, T030N, T030P, T030S, T030V, T030W, T030Y, N031K, N031H, N031D, N031E, N031G, N031I, N031T, N031V, N031L, Y032H, Y032R, Y032C, Y032M, Y032N, Y032T, Y032V, Y032L, G033E, G033M, G033S, G033T, G033Y, V034A, V034C, V034I, V034M, V034P, V034L, H035I, H035Q, W036K, W036A, W036I, W036V, W036Y, V050K, V050H, V050A, V050D, V050E, V050G, V050I, V050N, V050Q, V050T, V050L, I051K, I051H, I051A, I051C, 1051E, I051G, I051N, I051Q, I051S, I051V, I051Y, I52L, W052I, W052N, W052Y, S053H, S053R, S053A, S053C, S053G, S053I, S053M, S053P, S053Q, S053L, S053T, S053V, S053Y, G054H, G054R, G054A, G054C, G054D, G054P, G054S, G055H, G055R, G055M, G055S, G055Y, N056K, N056A, N056P, N056S, N056V, N056G, T057H, T057R, T057L, T057A, T057C, T057D, T057F, T057M, T057N, T057Q, T057W, T057Y, D058L, D058G, D058M, D058N, D058Q, Y059H, Y059R, Y059A, Y059C, Y059D, Y059E, Y059G, Y059I, Y059P, Y059Q, Y059S, Y059T, Y059V, Y059W, N060K, N060A, N060C, N060D, N060F, N060G, N060P, N060Q, N060S, N060T, N060Y, T061N, T061Q, P062G, F063H, F063R, F063L, F063A, F063C, F063D, F063G, F063M, F063N, F063Q, F063S, F063V, F063P, T064R, T064L, T064C, T064F, T064G, T064N, T064Q, T064V, S065H, S065R, S065L, S065C, S065E, S065F, S065G, S0651, S065M, S065N, S065P, S065Q, S065T, S065W, S065Y, R066L, R066A, R066C, R066E, R066F, R066N, R066P, R066Q, R066S, R066T, R066V, R066G, L067A, L067C, L067D, L067E, L067I, L067M, L067Q, L067S, L067T, L067V, L067Y, L067G, S068K, S068H, S068R, S068L, S068C, S068D, S068E, S068F, S068G, S068I, S068N, S068Q, S068T, S068V, I069A, I069C, I069G, I069Y, N070H, N070R, N070L, N070D, N070E, N070F, N070G, N070I, N070P, N070Q, N070S, N070T, N070V, N070Y, K071H, K071R, K071L, K071A, K071C, K071F, K071G, K071Q, K071S, K071T, K071V, K071W, K071Y, D072K, D072H, D072R, D072L, D072A, D072G, D072I, D072M, D072N, D072Q, D072S, D072V, D072W, D072Y, D072P, N073H, N073R, N073L, N073A, N073C, N073G, N073I, N073M, N073P, N073Q, N073S, N073T, N073V, N073W, N073Y, S074K, S074H, S074R, S074L, S074A, S074C, S074D, S074E, S074G, S074I, S074M, S074P, S074T, S074V, S074Y, K075H, K075R, K075L, K075A, K075C, K075E, K075F, K075M, K075Q, K075T, K075V, K075W, K075Y, K075G, K075P, S076H, S076R, S076L, S076A, S076C, S076D, S076E, S076F, S076M, S076P, S076Q, S076T, S076Y, S0761, S076V, Q077H, Q077R, Q077L, Q077A, Q077E, Q077G, Q077I, Q077M, Q077N, Q077S, Q077V, Q077W, Q077Y, Y093H, Y093V, Y093W, Y094R, Y094L, R097H, R097W, A098P, L099N, L099W, T100H, T100L, T100A, T100D, T100I, T100N, T100P, T100Q, T100S, T100V, T100Y, Y101H, Y101E, Y101F, Y101M, Y101W, Y102R, Y102C, Y102D, Y102I, Y102N, Y102W, D103R, D103L, D103A, D103C, D103I, D103P, D103Q, D103Y, E105H, E105T, F106L, F106V, F106W, F106Y, A107K, A107H, A107R, A107L, A107C, A107D, A107E, A107G, A107N, A107S, A107T, A107Y, Y108K, Y108H, Y108R, Y108L, Y108C, Y108F, Y108I, Y108N, Y108S, Y108T, Y108V, Y108W, W109I, W109M, W109Y, G110R, G110A, G110M, G110P, G110T, Q111K, Q111H, Q111R, Q111L, Q111D, Q111E, Q111G, Q111M, Q111P, Q111S, Q111T, Q111W, Q111Y, Q111V, Q111I, G112A, G112N, G112P, G112S, G112T and/or G112Y, with reference to the amino acid positions set forth in SEQ ID NO: 2 or 7.

[0021] In any of the examples herein, a modified anti-EGFR antibody, or antigen-binding fragment thereof, contains one or more additional amino acid replacement(s) in a variable heavy chain of the unmodified antibody corresponding to amino acid replacement(s) V24I, V24L, V24E, S25C, S25G, S25I, S25M, S25V, S25Q, S25T, S25L, S25H, S25R, S25A, S25D, F27R, S28C, L29H, T30F, N31H, N31I, N31T, N31V, Y32T, V50L, S53G, G54D, G54S, G54R, G54C, G54P, D58M, Y59E, F63R, F63C, F63G, F63M, F63V, F63P, F63S, T64N, T64V, L67G, S68F, S68Q, D72K, D72L, D72P, D72M, D72W, N73Q, S74H, S74R, S74D, S74G, S74Y, K75H, K75G, K75W, K75P, S76I, S76V, Q77R, Q77E, R97H, T100I, T100P, Y101W, Y105V, A107N, Q111I, Q111P, and/or Q111V with reference to SEQ ID NO: 2 or 7. In such examples, the corresponding amino acid positions are identified by alignment of the variable heavy chain of the antibody with the variable heavy chain set forth in SEQ ID NO: 2 or 7.

[0022] For example, the modified anti-EGFR antibody, or antigen-binding fragment thereof, can contain one or more amino acid replacement(s) in the variable heavy chain of the unmodified antibody corresponding to amino acid replacement(s) V24E, S25C, S25V, F27R, T30F, S53G, D72L, R97H, and/or Q111P. Non-limiting examples of modified anti-EGFR antibodies, and antigen-binding fragments thereof, which contain additional modifications include anti-EGFR antibody, or antigen-binding fragment thereof, with the amino acid replacements HC-Y104E/HC-Q111P; HC-S25C/HC-Y104E; HC-Y104E/LC-I29S; HC-Y104E/HC-Q111P/LC-I29S; HC-S53G/HC-Y104E; HC-S53G/HC-Y104E/HC-Q111P; HC-S25V/HC-Y104E; HC-S25V/HC-Y104E/HC-Q111P; HC-S25V/HC-S53G/HC-Y104E; HC-S25V/HC-S53G/HC-Y104E/HC-Q111P; HC-T30F/HC-Y104E; HC-T30F/HC-Y104E/HC-Q111P; HC-T30F/HC-S53G/HC-Y104E; HC-T30F/HC-S53G/HC-Y104E/HC-Q111P; HC-D72L/HC-Y104E; HC-D72L/HC-Y104E/HC-Q111P; HC-S53G/HC-D72L/HC-Y104E; or HC-S53G/HC-D72L/HC-Y104E/HC-Q111P, where HC denotes the modification in the heavy chain of the antibody or antigen binding fragment.

[0023] Included among the modified anti-EGFR antibodies and antigen fragments provided herein are those that contain a variable heavy (VH) chain having the sequence of amino acids set forth in SEQ ID NOS: 77, 78, 80, 81, 83, 84, 86, 87, 89, 90, 92, 93, 95, 96, 98, 99, 101, 102, 104, 105, 107, 108, 110, 111, 113, 114, 116, 117, 119, 120, 122, or 123, or a sequence of amino acids that exhibits at least 85% sequence identity to any of SEQ ID NOS: 77, 78, 80, 81, 83, 84, 86, 87, 89, 90, 92, 93, 95, 96, 98, 99, 101, 102, 104, 105, 107, 108, 110, 111, 113, 114, 116, 117, 119, 120, 122, or 123; and a variable light (VL) chain having the sequence of amino acids set forth in SEQ ID NO: 4, 9 or 11, or a sequence of amino acids that exhibits at least 85% sequence identity to SEQ ID NO: 4, 9 or 11.

[0024] For example, an unmodified cetuximab antibody or antigen-binding fragment thereof with a variable heavy chain set forth in SEQ ID NO: 2 and a variable light chain set forth in SEQ ID NO: 4 can be modified to generate a modified anti-EGFR antibody or antigen-binding fragment, as provided herein, that contains a variable heavy (VH) chain having the sequence of amino acids set forth in SEQ ID NO: 80, 84, 87, 90, 93, 96, 99, 102, 105, 108, 111, 114, 117, 120, or 123, or a sequence of amino acids that exhibits at least 85% sequence identity to any of SEQ ID NOS: 80, 84, 87, 90, 93, 96, 99, 102, 105, 108, 111, 114, 117, 120, or 123; and a variable light (VL) chain with the sequence of amino acids set forth in SEQ ID NO: 4, or a sequence of amino acids that exhibits at least 85% sequence identity to SEQ ID NO: 4.

[0025] In other examples, an unmodified cetuximab antibody or antigen-binding fragment thereof with a variable heavy chain set forth in SEQ ID NO: 7 and a variable light chain set forth in SEQ ID NO: 9 can be modified to generate a modified anti-EGFR antibody or antigen-binding fragment, as provided herein, that contains a variable heavy (VH) chain having the sequence of amino acids set forth in SEQ ID NO: 77, 80, 83, 86, 89, 92, 95, 98, 101, 104, 107, 110, 113, 116, 119, or 122, or a sequence of amino acids that exhibits at least 85% sequence identity to any of SEQ ID NOS: 77, 80, 83, 86, 89, 92, 95, 98, 101, 104, 107, 110, 113, 116, 119, or 122; and a variable light (VL) chain having the sequence of amino acids set forth in SEQ ID NO: 9, or a sequence of amino acids that exhibits at least 85% sequence identity to SEQ ID NO: 9.

[0026] In other examples, an unmodified cetuximab antibody or antigen-binding fragment thereof with a variable heavy chain set forth in SEQ ID NO: 7 and a variable light chain set forth in SEQ ID NO: 11 can be modified to generate a modified anti-EGFR antibody or antigen-binding fragment, as provided herein, that contains a variable heavy (VH) chain having the sequence of amino acids set forth SEQ ID NO: 77, 80, 83, 86, 89, 92, 95, 98, 101, 104, 107, 110, 113, 116, 119, or 122, or a sequence of amino acids that exhibits at least 85% sequence identity to any of SEQ ID NOS: 77, 80, 83, 86, 89, 92, 95, 98, 101, 104, 107, 110, 113, 116, 119, or 122; and a variable light (VL) chain having the sequence of amino acids set forth in SEQ ID NO: 11, or a sequence of amino acids that exhibits at least 85% sequence identity to SEQ ID NO: 11.

[0027] Other exemplary modified anti-EGFR antibodies, or antigen-binding fragments thereof, can contain a variable heavy (VH) chain having the sequence of amino acids set forth in SEQ ID NO: 74, 77 or 104, or a sequence of amino acids that exhibits at least 85% sequence identity to any of SEQ ID NOS: 74, 77 or 104; and a variable light (VL) chain having the sequence of amino acids set forth in any of SEQ ID NOS: 4, 9 or 11, or a sequence of amino acids that exhibits at least 85% sequence identity to any of SEQ ID NOS: 4, 9 or 11.

[0028] In some examples, the modified anti-EGFR antibody, or antigen-binding fragment thereof, is a full-length antibody. Such modified antibodies can have a heavy chain constant region as set forth in amino acids 120-449 of any of SEQ ID NOS: 76, 79, 82, 85, 88, 91, 94, 97, 100, 103, 106, 109, 112, 115, 118, or 121, or a variant thereof that exhibits at least 85% sequence identity to amino acids 120-449 of any of SEQ ID NOS: 76, 79, 82, 85, 88, 91, 94, 97, 100, 103, 106, 109, 112, 115, 118, or 121; and a light chain constant region as set forth in amino acids 108-213 of SEQ ID NO: 3 or 10 or a variant thereof that exhibits at least 85% sequence identity thereto or a constant region set forth in amino acids 108-214 of SEQ ID NO: 8 or 13, or a variant thereof that exhibits at least 85% sequence identity thereto. For example, such modified antibodies can have a full-length heavy chain with the sequence of amino acids set forth in any of SEQ ID NOS: 76, 79, 82, 85, 88, 91, 94, 97, 100, 103, 106, 109, 112, 115, 118, or 12, or a variant thereof that exhibits at least 85% sequence identity thereto, and a full-length light chain with the sequence of amino acids set forth in any of SEQ ID NOS: 3, 8, 10 or 13, or a variant thereof that exhibits at least 85% sequence identity thereto.

[0029] Any of the above exemplary modified anti-EGFR antibodies or antigen-binding fragments can further contain one or more amino acid replacement(s) in the variable light chain of the unmodified antibody corresponding to amino acid replacement(s) DOO1W, I002C, I002V, I002W, L003D, L003F, L003G, L0035, L003T, L003V, L003W, L003Y, L003R, L004C, L004E, L004F, L004I, L004P, L004S, L004T, L004V, L004W, L004K, L004H, L004R, T005A, T005C, T005D, T005E, T005F, T005G, T005N, T005S, T005W, T005L, T005K, T005H, T005R, T005P, R024A, R024C, R024F, R024L, R024M, R024S, R024W, R024Y, R024G, A025C, A025G, A025L, A025V, S026A, S026C, S026D, S026I, S026M, S026N, S026V, S026W, 5026L, S026G, S026H, S026R, Q027A, Q027D, Q027E, Q027F, Q027I, Q027M, Q027N, Q027P, Q027T, S028A, S028D, S028N, S028Q, S028L, S028K, 5028H, I029A, I029E, I029F, I1029S, I029T, I029R, G030A, G030E, G030F, G030I, G030M, G030P, G030Q, G030S, G030V, G030Y, G030L, G030K, G030H, G030R, T031A, T031F, T031G, T031M, T031S, T031V, T031W, T031L, T031K, T031H, N032G, I033F, I033G, I033M, I033T, I033V, I033H, I048M, I048S, I048L, I048K, K049A, K049E, K049F, K049G, K049N, K049Q, K049S, K049T, K049V, K049Y, K049L, K049H, K049R, A051T, A051L, S052A, S052C, S052D, 5052E, S052G, S052I, S052M, S052Q, S052V, S052W, S052R, S052K, E053G, S054M, I055A, I055F, S056G, S056L, S056A, S056C, S056D, S056E, S056F, S056N, S056P, S056Q, S056V, S056W, S056H, S056R, S056K, Y086F, Y086M, Y086H, Y087L, Y087C, Y087D, Y087F, Y087G, Y0871, Y087N, Y087P, Y087S, Y087T, Y087V, Y087W, Y087K, Y087H, Y087R, Q089E, N091L, N091A, N091C, N091I, N091M, N091 S, N091T, N091V, N091H, N091R, N092C, N092D, N092L, N092M, N092S, N092T, N092V, N092W, N092Y, N092H, N092K, N092R, N093T, T096L, T096C, T096M, T096V, T097L, T097A, T097D, T097G, T097Q, T097S, T097V, T097K, T097R, F098A, F098M, F098S, F098V, F098Y, G099L, G099D, G099E, G099F, G099I, G099M, G099N, G099S, G099T, G099V, G099K, G099H, Q100C, Q100D, Q100E, Q100F, Q100I, Q100M, Q100N, Q100P, Q100T, Q100V, Q100W, Q100Y, Q100K, Q100H or Q100R with reference to amino acid positions set forth in SEQ ID NO: 4, wherein corresponding amino acid position are identified by alignment of the variable light chain of the antibody with the variable light chain set forth in SEQ ID NO: 4.

[0030] In some examples, the modified anti-EGFR antibody, or antigen-binding fragment thereof, contains an amino acid replacement(s) in the variable light chain of the unmodified antibody corresponding to amino acid replacement(s) L4C, L4F, L4V, T5P, R24G, I29S, S56H and/or N91V with reference to SEQ ID NO: 4, wherein corresponding amino acid positions are identified by alignment of the variable light chain of the antibody with the variable light chain set forth in SEQ ID NO: 4. In particular examples, the modified anti-EGFR antibody, or antigen-binding fragment thereof, contains an amino acid replacement in the variable light chain of the unmodified antibody corresponding to amino acid replacement I29S with reference to SEQ ID NO: 4. Examples of such antibodies include those where the amino acid replacements are HC-Y104E/LC-I29S or HC-Y104E/HC-Q111P/LC-I29S.

[0031] Exemplary modified anti-EGFR antibodies, or antigen-binding fragments thereof, provided herein, which contain a modified variable heavy chain and a modified variable light chain, can contain a modified variable heavy (VH) chain having the sequence of amino acids set forth in any of SEQ ID NO: 74, 75, 77, 78, 80, 81, 83, 84, 86, 87, 89, 90, 92, 93, 95, 96, 98, 99, 101, 102, 104, 105, 107, 108, 110, 111, 113, 114, 116, 117, 119, 120, 122, or 123, or a sequence of amino acids that exhibits at least 85% sequence identity to any of SEQ ID NOS: 74, 75, 77, 78, 80, 81, 83, 84, 86, 87, 89, 90, 92, 93, 95, 96, 98, 99, 101, 102, 104, 105, 107, 108, 110, 111, 113, 114, 116, 117, 119, 120, 122, or 123; and a modified variable light (VL) chain having the sequence of amino acids set forth in SEQ ID NO: 125, 126, or 127, or a sequence of amino acids that exhibits at least 85% sequence identity to any of SEQ ID NOS: 125, 126 or 127.

[0032] For example, the variable heavy and light chains of an unmodified cetuximab antibody, or antigen-binding fragment thereof, as set forth in SEQ ID NOS: 2 and 4, respectively, can be modified to generate a modified anti-EGFR antibody, or antigen-binding fragment thereof, that has a modified variable heavy (VH) chain having the sequence of amino acids set forth in SEQ ID NO: 81, 84, 87, 90, 93, 96, 99, 102, 105, 108, 111, 114, 117, 120, or 123, or a sequence of amino acids that exhibits at least 85% sequence identity to any of SEQ ID NOS: 81, 84, 87, 90, 93, 96, 99, 102, 105, 108, 111, 114, 117, 120, or 123; and a modified variable light (VL) chain containing the sequence of amino acids set forth in SEQ ID NO: 126, or a sequence of amino acids that exhibits at least 85% sequence identity to SEQ ID NO: 126.

[0033] In other examples, the variable heavy and light chains of an unmodified cetuximab antibody, or antigen-binding fragment thereof, as set forth in SEQ ID NOS: 7 and 9, respectively, can be modified to generate a modified anti-EGFR antibody, or antigen-binding fragment thereof, that has a modified variable heavy (VH) chain that has the sequence of amino acids set forth in SEQ ID NO: 77, 80, 83, 86, 89, 92, 95, 98, 101, 104, 107, 110, 113, 116, 119, or 122, or a sequence of amino acids that exhibits at least 85% sequence identity to any of SEQ ID NOS: 77, 80, 83, 86, 89, 92, 95, 98, 101, 104, 107, 110, 113, 116, 119, or 122; and a modified variable light (VL) chain that has the sequence of amino acids set forth in SEQ ID NO: 125, or a sequence of amino acids that exhibits at least 85% sequence identity to SEQ ID NO: 125.

[0034] In further examples, the variable heavy and light chains of an unmodified cetuximab antibody, or antigen-binding fragment thereof, as set forth in SEQ ID NOS: 7 and 11, respectively, can be modified to generate a modified anti-EGFR antibody, or antigen-binding fragment thereof, that has a modified variable heavy (VH) chain that has the sequence of amino acids set forth in SEQ ID NO: 77, 80, 83, 86, 89, 92, 95, 98, 101, 104, 107, 110, 113, 116, 119, or 122, or a sequence of amino acids that exhibits at least 85% sequence identity to any of SEQ ID NOS: 77, 80, 83, 86, 89, 92, 95, 98, 101, 104, 107, 110, 113, 116, 119, or 122; and a modified variable light (VL) chain that has the sequence of amino acids set forth in SEQ ID NO: 127, or a sequence of amino acids that exhibits at least 85% sequence identity to SEQ ID NO: 127.

[0035] In some examples, the modified anti-EGFR antibodies, are full length IgG antibodies, that have a modified heavy chain variable region set forth in any of SEQ ID NOS: 74, 75, 77, 78, 80, 81, 83, 84, 86, 87, 89, 90, 92, 93, 95, 96, 98, 99, 101, 102, 104, 105, 107, 108, 110, 111, 113, 114, 116, 117, 119, 120, 122, or 123, or a sequence of amino acids that exhibits at least 85% sequence identity to any of SEQ ID NOS: 74, 75, 77, 78, 80, 81, 83, 84, 86, 87, 89, 90, 92, 93, 95, 96, 98, 99, 101, 102, 104, 105, 107, 108, 110, 111, 113, 114, 116, 117, 119, 120, 122, or 123 and a heavy chain constant region set forth in amino acids 120-449 of any of SEQ ID NOS: 72, 76, 79, 82, 85, 88, 91, 94, 97, 100, 103, 106, 109, 112, 115, 118, or 121, or a variant thereof that exhibits at least 85% sequence identity to amino acids 120-449 of any of SEQ ID NOS: 72, 76, 79, 82, 85, 88, 91, 94, 97, 100, 103, 106, 109, 112, 115, 118, or 121; and a modified variable light (VL) chain having the sequence of amino acids set forth in SEQ ID NO: 125, 126, or 127, or a sequence of amino acids that exhibits at least 85% sequence identity to any of SEQ ID NOS: 125, 126 or 127 and a light chain constant region set forth in amino acids 108-214 of SEQ ID NO: 124, or a variant thereof that exhibits at least 85% sequence identity to amino acids 108-214 of SEQ ID NO: 124. For example, the full-length IgG antibodies can have a full-length modified heavy chain set forth in any of SEQ ID NOS: 74, 75, 77, 78, 80, 81, 83, 84, 86, 87, 89, 90, 92, 93, 95, 96, 98, 99, 101, 102, 104, 105, 107, 108, 110, 111, 113, 114, 116, 117, 119, 120, 122, or 123, or a sequence of amino acids that exhibits at least 85% sequence identity to any of SEQ ID NOS: 74, 75, 77, 78, 80, 81, 83, 84, 86, 87, 89, 90, 92, 93, 95, 96, 98, 99, 101, 102, 104, 105, 107, 108, 110, 111, 113, 114, 116, 117, 119, 120, 122, or 123; and a full-length light chain set forth in SEQ ID NO: 124, or a variant thereof that exhibits at least 85% sequence identity to SEQ ID NO: 124.

[0036] Any of the exemplary modified anti-EGFR antibodies provided herein above can be further modified so that they are humanized. The humanized antibodies, or antigen-binding fragments, provided herein can contain a variable heavy chain that exhibits between 65% and 85% sequence identity to the variable heavy chain set forth in SEQ ID NO: 2 or 7; and a variable light chain exhibits between 65% and 85% sequence identity to the variable light chain set forth in SEQ ID NO: 4. Such humanized, modified anti-EGFR antibodies, or antigen-bind fragments thereof, can contain the amino acid replacement with glutamic acid (E) at a position corresponding to position 104 of SEQ ID NO: 2 or 7.

[0037] Exemplary humanized and modified anti-EGFR antibodies, or antigen-binding fragments thereof, provided herein have a sequence of amino acids containing the variable heavy chain set forth in SEQ ID NO: 61 or 63 or a sequence of amino acids that exhibits at least 85% sequence identity to SEQ ID NO: 61 or 63, and the variable light chain set forth in SEQ ID NO: 183, 184 or 186 or a sequence of amino acids that exhibits at least 85% sequence identity to SEQ ID NO: 183, 184 or 186.

[0038] In some examples, the unmodified anti-EGFR antibody or antigen-binding fragment thereof, having a variable heavy chain set forth in SEQ ID NO: 2 and a variable light chain set forth in SEQ ID NO: 4, is humanized and modified to generate an anti-EGFR antibody or antigen-binding fragment that has a variable heavy chain set forth in SEQ ID NO: 63 or a sequence of amino acids that exhibits at least 85% sequence identity to SEQ ID NO: 63, and a variable light chain set forth in SEQ ID NO: 184 or a sequence of amino acids that exhibits at least 85% sequence identity to SEQ ID NO: 184.

[0039] In other examples, the unmodified anti-EGFR antibody or antigen-binding fragment thereof, having a variable heavy chain set forth in SEQ ID NO: 7 and a variable light chain set forth in SEQ ID NO: 9, is humanized and modified to generate an anti-EGFR antibody or antigen-binding fragment that has a variable heavy chain set forth in SEQ ID NO: 61 or a sequence of amino acids that exhibits at least 85% sequence identity to SEQ ID NO: 61, and a variable light chain set forth in SEQ ID NO: 183 or a sequence of amino acids that exhibits at least 85% sequence identity to SEQ ID NO: 183.

[0040] In further examples, the unmodified anti-EGFR antibody or antigen-binding fragment thereof, having a variable heavy chain set forth in SEQ ID NO: 7 and a variable light chain set forth in SEQ ID NO: 11, is humanized and modified to generate an anti-EGFR antibody or antigen-binding fragment that has a variable heavy chain set forth in SEQ ID NO: 61 or a sequence of amino acids that exhibits at least 85% sequence identity to SEQ ID NO: 61, and a variable light chain set forth in SEQ ID NO: 186 or a sequence of amino acids that exhibits at least 85% sequence identity to SEQ ID NO: 186.

[0041] In some examples, the humanized, modified anti-EGFR antibody, or antigen-binding fragment thereof, is a full-length IgG antibody, which has a heavy chain having the sequence of amino acids set forth in SEQ ID NO: 59 or a sequence of amino acids that exhibits at least 85% sequence identity to SEQ ID NO: 59, and a light chain with a sequence of amino acids set forth in SEQ ID NO: 181 or a sequence of amino acids that exhibits at least 85% sequence identity to SEQ ID NO: 181.

[0042] Any of the humanized, modified anti-EGFR antibodies, or antigen-binding fragments thereof, described herein above can contain additional modifications, such as one or more amino acid replacement(s) in the variable heavy chain corresponding to amino acid replacement(s) selected from among T023K, T023H, T023R, T023A, T023C, T023E, T023G, T023I, T023M, T023N, T023P, T023S, T023V, T023W, T023L, V024R, V024A, V024F, V024G, V024I, V024M, V024P, V024S, V024T, V024L, V024E, S025H, S025R, S025A, S025C, S025D, S025E, S025F, S025G, S025I, S025M, S025P, S025Q, S025T, S025V, S025L, G026H, G026R, G026D, G026F, G026M, G026N, G026P, G026Q, G026S, G026Y, G026L, F027H, F027R, F027A, F027D, F027E, F027G, F027M, F027P, F027Q, F027S, F027T, F027V, F027W, F027Y, F027L, S028K, S028H, S028R, S028A, S028D, S0281, S028M, S028P, S028Q, S028V, S028W, S028L, S028C, L029K, L029H, L029A, L029D, L029G, L029I, L029M, L029N, L029S, L029V, T030H, T030R, T030D, T030G, T030I, T030M, T030N, T030P, T030S, T030V, T030W, T030Y, N031K, N031H, N031D, N031E, N031G, N031I, N031T, N031V, N031L, Y032H, Y032R, Y032C, Y032M, Y032N, Y032T, Y032V, Y032L, G033E, G033M, G033S, G033T, G033Y, V034A, V034C, V034I, V034M, V034P, V034L, H035I, H035Q, W036K, W036A, W036I, W036V, W036Y, V050K, V050H, V050A, V050D, V050E, V050G, V050I, V050N, V050Q, V050T, V050L, I051K, I051H, I051A, I051C, 1051E, I051G, I051N, I051Q, I051S, I051V, I051Y, I051L, W052I, W052N, W052Y, S053H, S053R, S053A, S053C, S053G, S053I, S053M, S053P, S053Q, S053L, S053T, S053V, S053Y, G054H, G054R, G054A, G054C, G054D, G054P, G054S, G055H, G055R, G055M, G055S, G055Y, N056K, N056A, N056P, N056S, N056V, N056G, T057H, T057R, T057L, T057A, T057C, T057D, T057F, T057M, T057N, T057Q, T057W, T057Y, D058L, D058G, D058M, D058N, D058Q, Y059H, Y059R, Y059A, Y059C, Y059D, Y059E, Y059G, Y059I, Y059P, Y059Q, Y059S, Y059T, Y059V, Y059W, N060K, N060A, N060C, N060D, N060F, N060G, N060P, N060Q, N060S, N060T, N060Y, T061N, T061Q, P062G, F063H, F063R, F063L, F063A, F063C, F063D, F063G, F063M, F063N, F063Q, F063S, F063V, F063P, T064R, T064L, T064C, T064F, T064G, T064N, T064Q, T064V, S065H, S065R, S065L, S065C, S065E, S065F, S065G, S0651, S065M, S065N, S065P, S065Q, S065T, S065W, S065Y, R066L, R066A, R066C, R066E, R066F, R066N, R066P, R066Q, R066S, R066T, R066V, R066G, L067A, L067C, L067D, L067E, L067I, L067M, L067Q, L067S, L067T, L067V, L067Y, L067G, S068K, S068H, S068R, S068L, S068C, S068D, S068E, S068F, S068G, S068I, S068N, S068Q, S068T, S068V, I069A, I069C, I069G, I069Y, N070H, N070R, N070L, N070D, N070E, N070F, N070G, N070I, N070P, N070Q, N070S, N070T, N070V, N070Y, K071H, K071R, K071L, K071A, K071C, K071F, K071G, K071Q, K071S, K071T, K071V, K071W, K071Y, D072K, D072H, D072R, D072L, D072A, D072G, D072I, D072M, D072N, D072Q, D072S, D072V, D072W, D072Y, D072P, N073H, N073R, N073L, N073A, N073C, N073G, N073I, N073M, N073P, N073Q, N073S, N073T, N073V, N073W, N073Y, S074K, S074H, S074R, S074L, S074A, S074C, S074D, S074E, S074G, S074I, S074M, S074P, S074T, S074V, S074Y, K075H, K075R, K075L, K075A, K075C, K075E, K075F, K075M, K075Q, K075T, K075V, K075W, K075Y, K075G, K075P, S076H, S076R, S076L, S076A, S076C, S076D, S076E, S076F, S076M, S076P, S076Q, S076T, S076Y, S0761, S076V, Q077H, Q077R, Q077L, Q077A, Q077E, Q077G, Q077I, Q077M, Q077N, Q077S, Q077V, Q077W, Q077Y, Y093H, Y093V, Y093W, Y094R, Y094L, R097H, R097W, A098P, L099N, L099W, T100H, T100L, T100A, T100D, T100I, T100N, T100P, T100Q, T100S, T100V, T100Y, Y101H, Y101E, Y101F, Y101M, Y101W, Y102R, Y102C, Y102D, Y102I, Y102N, Y102W, D103R, D103L, D103A, D103C, D103I, D103P, D103Q, D103Y, E105H, E105T, F106L, F106V, F106W, F106Y, A107K, A107H, A107R, A107L, A107C, A107D, A107E, A107G, A107N, A107S, A107T, A107Y, Y108K, Y108H, Y108R, Y108L, Y108C, Y108F, Y108I, Y108N, Y108S, Y108T, Y108V, Y108W, W109I, W109M, W109Y, G110R, G110A, G110M, G110P, G110T, Q111K, Q111H, Q111R, Q111L, Q111D, Q111E, Q111G, Q111M, Q111P, Q111S, Q111T, Q111W, Q111Y, Q111V, Q111I, G112A, G112N, G112P, G112S, G112T and G112Y, with reference to positions of the unmodified variable heavy chain set forth in SEQ ID NO: 2 or 7; and/or

[0043] one or more amino acid replacement(s) in a variable light chain of the unmodified antibody corresponding to amino acid replacement(s) D001 W, I002C, I002V, I002W, L003D, L003F, L003G, L0035, L003T, L003V, L003W, L003Y, L003R, L004C, L004E, L004F, L004I, L004P, L004S, L004T, L004V, L004W, L004K, L004H, L004R, T005A, T005C, T005D, T005E, T005F, T005G, T005N, T005S, T005W, T005L, T005K, T005H, T005R, T005P, R024A, R024C, R024F, R024L, R024M, R024S, R024W, R024Y, R024G, A025C, A025G, A025L, A025V, S026A, S026C, S026D, S026I, S026M, S026N, S026V, S026W, S026L, S026G, S026H, S026R, Q027A, Q027D, Q027E, Q027F, Q027I, Q027M, Q027N, Q027P, Q027T, S028A, S028D, S028N, S028Q, S028L, S028K, S028H, I029A, I029E, I029F, I029S, I029T, I029R, G030A, G030E, G030F, G030I, G030M, G030P, G030Q, G030S, G030V, G030Y, G030L, G030K, G030H, G030R, T031A, T031F, T031G, T031M, T031S, T031V, T031W, T031L, T031K, T031H, N032G, I033F, I033G, I033M, I033T, I033V, I033H, I048M, I048S, I048L, I048K, K049A, K049E, K049F, K049G, K049N, K049Q, K049S, K049T, K049V, K049Y, K049L, K049H, K049R, A051T, A051L, S052A, S052C, S052D, S052E, S052G, S052I, S052M, S052Q, S052V, S052W, S052R, S052K, E053G, S054M, I055A, I055F, S056G, S056L, S056A, S056C, S056D, S056E, S056F, S056N, S056P, S056Q, S056V, S056W, S056H, S056R, S056K, Y086F, Y086M, Y086H, Y087L, Y087C, Y087D, Y087F, Y087G, Y0871, Y087N, Y087P, Y087S, Y087T, Y087V, Y087W, Y087K, Y087H, Y087R, Q089E, N091L, N091A, N091C, N091I, N091M, N091S, N091 T, N091V, N091H, N091R, N092C, N092D, N092L, N092M, N092S, N092T, N092V, N092W, N092Y, N092H, N092K, N092R, N093T, T096L, T096C, T096M, T096V, T097L, T097A, T097D, T097G, T097Q, T097S, T097V, T097K, T097R, F098A, F098M, F098S, F098V, F098Y, G099L, G099D, G099E, G099F, G099I, G099M, G099N, G099S, G099T, G099V, G099K, G099H, Q100C, Q100D, Q100E, Q100F, Q100I, Q100M, Q100N, Q100P, Q100T, Q100V, Q100W, Q100Y, Q100K, Q100H or Q100R with reference to amino acid positions set forth in SEQ ID NO: 4, wherein corresponding amino acid positions are identified by alignment of the variable light chain of the antibody with the variable light chain set forth in SEQ ID NO: 4.

[0044] Any of the modified anti-EGFR antibodies, or antigen-binding fragments thereof, can further contain an amino acid replacement(s) in a variable heavy chain of the unmodified antibody corresponding to amino acid replacement V24I, V24L, V24E, S25C, S25G, S25I, S25M, S25V, S25Q, S25T, S25L, S25H, S25R, S25A, S25D, F27R, S28C, L29H, T30F, N31H, N31I, N31T, N31V, Y32T, V50L, S53G, G54D, G54S, G54R, G54C, G54P, D58M, Y59E, F63R, F63C, F63G, F63M, F63V, F63P, F63S, T64N, T64V, L67G, S68F, S68Q, D72K, D72L, D72P, D72M, D72W, N73Q, S74H, S74R, S74D, S74G, S74Y, K75H, K75G, K75W, K75P, S76I, S76V, Q77R, Q77E, R97H, T100I, T100P, Y101W, Y105V, A107N, Q111I, Q111P, Q111V with reference to SEQ ID NO: 2 or 7, wherein corresponding amino acid positions are identified by alignment of the variable heavy chain of the antibody with the variable heavy chain set forth in SEQ ID NO: 2 or 7.

[0045] In any of such examples the humanized, modified anti-EGFR antibodies, or antigen-binding fragments thereof, provided herein, contain one or more further amino acid replacement(s) in the variable heavy chain corresponding to amino acid replacement (s) V24E, S25C, S25V, F27R, T30F, S53G, D72L, R97H, and Q111P of the unmodified antibody. For example, a humanized, modified anti-EGFR antibody or antigen fragment described herein can contain the amino acid replacements in the variable heavy chain or full-length heavy chain corresponding to HC-Y104E/HC-Q111P; HC-S25C/HC-Y104E; HC-Y104E/LC-1295; HC-Y104E/HC-Q111P/LC-I29S; HC-S53G/HC-Y104E; HC-S53G/HC-Y104E/HC-Q111P; HC-S25V/HC-Y104E; HC-S25V/HC-Y104E/HC-Q111P; HC-S25V/HC-S53G/HC-Y104E; HC-S25V/HC-S53G/HC-Y104E/HC-Q111P; HC-T30F/HC-Y104E; HC-T30F/HC-Y104E/HC-Q111P; HC-T30F/HC-S53G/HC-Y104E; HC-T30F/HC-S53G/HC-Y104E/HC-Q111P; HC-D72L/HC-Y104E; HC-D72L/HC-Y104E/HC-Q111P; HC-S53G/HC-D72L/HC-Y104E; or HC-S53G/HC-D72L/HC-Y104E/HC-Q111P. In particular examples, the humanized, modified anti-EGFR antibody, or antigen-binding fragment thereof, contains the amino acid replacements HC-Y104E/HC-Q111P or HC-T30F/HC-Y104E/HC-Q111P.

[0046] For example, among non-limiting examples of a humanized, modified anti-EGFR antibody, or antigen-binding fragment thereof, provided herein is an antibody that contains:

[0047] a) the variable heavy chain set forth in SEQ ID NO: 131 or 133 or a sequence of amino acids that exhibits at least 85% sequence identity to SEQ ID NO: 131 or 133, and the variable light chain set forth in SEQ ID NO: 155, 156 or 158 or a sequence of amino acids that exhibits at least 85% sequence identity to SEQ ID NO: 155, 156 or 158;

[0048] b) the variable heavy chain set forth in SEQ ID NO: 131 or 133 or a sequence of amino acids that exhibits at least 85% sequence identity to SEQ ID NO: 131 or 133, and the variable light chain set forth in SEQ ID NO: 162, 163 or 165 or a sequence of amino acids that exhibits at least 85% sequence identity to SEQ ID NO: 162, 163 or 165;

[0049] c) the variable heavy chain set forth in SEQ ID NO: 137 or 139 or a sequence of amino acids that exhibits at least 85% sequence identity to SEQ ID NO: 137 or 139, and the variable light chain set forth in SEQ ID NO: 155, 156 or 158 or a sequence of amino acids that exhibits at least 85% sequence identity to SEQ ID NO: 155, 156 or 158;

[0050] d) the variable heavy chain set forth in SEQ ID NO: 131 or 133 or a sequence of amino acids that exhibits at least 85% sequence identity to SEQ ID NO: 131 or 133, and the variable light chain set forth in SEQ ID NO: 169, 170 or 172 or a sequence of amino acids that exhibits at least 85% sequence identity to SEQ ID NO: 169, 170 or 172;

[0051] e) the variable heavy chain set forth in SEQ ID NO: 131 or 133 or a sequence of amino acids that exhibits at least 85% sequence identity to SEQ ID NO: 131 or 133, and the variable light chain set forth in SEQ ID NO: 176, 177 or 179 or a sequence of amino acids that exhibits at least 85% sequence identity to SEQ ID NO: 176, 177 or 179;

[0052] f) the variable heavy chain set forth in SEQ ID NO: 131 or 133 or a sequence of amino acids that exhibits at least 85% sequence identity to SEQ ID NO: 131 or 133 and the variable light chain set forth in SEQ ID NO: 183, 184 or 186 or a sequence of amino acids that exhibits at least 85% sequence identity to SEQ ID NO: 183, 184 or 186;

[0053] g) the variable heavy chain set forth in SEQ ID NO: 137 or 139 or a sequence of amino acids that exhibits at least 85% sequence identity to SEQ ID NO: 137 or 139, and the variable light chain set forth in SEQ ID NO: 183, 184 or 186 or a sequence of amino acids that exhibits at least 85% sequence identity to SEQ ID NO: 183, 184 or 186;

[0054] h) the variable heavy chain set forth in SEQ ID NO: 131 or 133 or a sequence of amino acids that exhibits at least 85% sequence identity to SEQ ID NO: 131 or 133, and the variable light chain set forth in SEQ ID NO: 190, 191 or 193 or a sequence of amino acids that exhibits at least 85% sequence identity to SEQ ID NO: 190, 191 or 193;

[0055] i) the variable heavy chain set forth in SEQ ID NO: 143 or 145 or a sequence of amino acids that exhibits at least 85% sequence identity to SEQ ID NO: 143 or 145, and the variable light chain set forth in SEQ ID NO: 183, 184 or 186 or a sequence of amino acids that exhibits at least 85% sequence identity to SEQ ID NO: 183, 184 or 186;

[0056] j) the variable heavy chain set forth in SEQ ID NO: 149 or 151 or a sequence of amino acids that exhibits at least 85% sequence identity to SEQ ID NO: 149 or 151, and the variable light chain set forth in SEQ ID NO: 197, 198 or 200 or a sequence of amino acids that exhibits at least 85% sequence identity to SEQ ID NO: 197, 198 or 200;

[0057] k) the variable heavy chain set forth in SEQ ID NO: 143 or 145 or a sequence of amino acids that exhibits at least 85% sequence identity to SEQ ID NO: 143 or 145, and the variable light chain set forth in SEQ ID NO: 197, 198 or 200 or a sequence of amino acids that exhibits at least 85% sequence identity to SEQ ID NO: 197, 198 or 200;

[0058] l) the variable heavy chain set forth in SEQ ID NO: 149 or 151 or a sequence of amino acids that exhibits at least 85% sequence identity to SEQ ID NO: 149 or 151, and the variable light chain set forth in SEQ ID NO: 204, 205 or 207 or a sequence of amino acids that exhibits at least 85% sequence identity to SEQ ID NO: 204, 205 or 207;

[0059] m) the variable heavy chain set forth in SEQ ID NO: 143 or 145 or a sequence of amino acids that exhibits at least 85% sequence identity to SEQ ID NO: 143 or 145, and the variable light chain set forth in SEQ ID NO: 204, 205 or 207 or a sequence of amino acids that exhibits at least 85% sequence identity to SEQ ID NO: 204, 205 or 207;

[0060] n) the variable heavy chain set forth in SEQ ID NO: 211 or 213 or a sequence of amino acids that exhibits at least 85% sequence identity to SEQ ID NO: 211 or 213, and the variable light chain set forth in SEQ ID NO: 253, 254 or 256 or a sequence of amino acids that exhibits at least 85% sequence identity to SEQ ID NO: 253, 254 or 256;

[0061] o) the variable heavy chain set forth in SEQ ID NO: 217 or 219 or a sequence of amino acids that exhibits at least 85% sequence identity to SEQ ID NO: 217 or 219, and the variable light chain set forth in SEQ ID NO: 253, 254 or 256 or a sequence of amino acids that exhibits at least 85% sequence identity to SEQ ID NO: 253, 254 or 256;

[0062] p) the variable heavy chain set forth in SEQ ID NO: 223 or 225 or a sequence of amino acids that exhibits at least 85% sequence identity to SEQ ID NO: 223 or 225, and the variable light chain set forth in SEQ ID NO: 260, 261 or 263 or a sequence of amino acids that exhibits at least 85% sequence identity to SEQ ID NO: 260, 261 or 263;

[0063] q) the variable heavy chain set forth in SEQ ID NO: 229 or 231 or a sequence of amino acids that exhibits at least 85% sequence identity to SEQ ID NO: 229 or 231, and the variable light chain set forth in SEQ ID NO: 260, 261 or 263 or a sequence of amino acids that exhibits at least 85% sequence identity to SEQ ID NO: 260, 261 or 263;

[0064] r) the variable heavy chain set forth in SEQ ID NO: 235 or 237 or a sequence of amino acids that exhibits at least 85% sequence identity to SEQ ID NO: 235 or 237, and the variable light chain set forth in SEQ ID NO: 267, 268 or 270 or a sequence of amino acids that exhibits at least 85% sequence identity to SEQ ID NO: 267, 268 or 270;

[0065] s) the variable heavy chain set forth in SEQ ID NO: 241 or 243 or a sequence of amino acids that exhibits at least 85% sequence identity to SEQ ID NO: 241 or 243, and the variable light chain set forth in SEQ ID NO: 274, 275 or 277 or a sequence of amino acids that exhibits at least 85% sequence identity to SEQ ID NO: 274, 275 or 277;

[0066] t) the variable heavy chain set forth in SEQ ID NO: 223 or 225 or a sequence of amino acids that exhibits at least 85% sequence identity to SEQ ID NO: 223 or 225, and the variable light chain set forth in SEQ ID NO: 274, 275 or 277 or a sequence of amino acids that exhibits at least 85% sequence identity to SEQ ID NO: 274, 275 or 277;

[0067] u) the variable heavy chain set forth in SEQ ID NO: 229 or 231 or a sequence of amino acids that exhibits at least 85% sequence identity to SEQ ID NO: 229 or 231, and the variable light chain set forth in SEQ ID NO: 274, 275 or 277 or a sequence of amino acids that exhibits at least 85% sequence identity to SEQ ID NO: 274, 275 or 277;

[0068] v) the variable heavy chain set forth in SEQ ID NO: 235 or 237 or a sequence of amino acids that exhibits at least 85% sequence identity to SEQ ID NO: 235 or 237, and the variable light chain set forth in SEQ ID NO: 281, 282 or 284 or a sequence of amino acids that exhibits at least 85% sequence identity to SEQ ID NO: 281, 282 or 284;

[0069] w) the variable heavy chain set forth in SEQ ID NO: 247 or 249 or a sequence of amino acids that exhibits at least 85% sequence identity to SEQ ID NO: 247 or 249, and the variable light chain set forth in SEQ ID NO: 281, 282 or 284 or a sequence of amino acids that exhibits at least 85% sequence identity to SEQ ID NO: 281, 282 or 284;

[0070] x) the variable heavy chain set forth in SEQ ID NO: 223 or 225 or a sequence of amino acids that exhibits at least 85% sequence identity to SEQ ID NO: 223 or 225, and the variable light chain set forth in SEQ ID NO: 281, 282 or 284 or a sequence of amino acids that exhibits at least 85% sequence identity to SEQ ID NO: 281, 282 or 284;

[0071] y) the variable heavy chain set forth in SEQ ID NO: 229 or 231 or a sequence of amino acids that exhibits at least 85% sequence identity to SEQ ID NO: 229 or 231, and the variable light chain set forth in SEQ ID NO: 281, 282 or 284 or a sequence of amino acids that exhibits at least 85% sequence identity to SEQ ID NO: 281, 282 or 284;

[0072] z) the variable heavy chain set forth in SEQ ID NO: 235 or 237 or a sequence of amino acids that exhibits at least 85% sequence identity to SEQ ID NO: 235 or 237, and the variable light chain set forth in SEQ ID NO: 288, 289 or 291 or a sequence of amino acids that exhibits at least 85% sequence identity to SEQ ID NO: 288, 289 or 291;

[0073] aa) the variable heavy chain set forth in SEQ ID NO: 247 or 249 or a sequence of amino acids that exhibits at least 85% sequence identity to SEQ ID NO: 247 or 249, and the variable light chain set forth in SEQ ID NO: 288, 289 or 291 or a sequence of amino acids that exhibits at least 85% sequence identity to SEQ ID NO: 288, 289 or 291;

[0074] bb) the variable heavy chain set forth in SEQ ID NO: 223 or 225 or a sequence of amino acids that exhibits at least 85% sequence identity to SEQ ID NO: 223 or 225, and the variable light chain set forth in SEQ ID NO: 288, 289 or 291 or a sequence of amino acids that exhibits at least 85% sequence identity to SEQ ID NO: 288, 289 or 291;

[0075] cc) the variable heavy chain set forth in SEQ ID NO: 229 or 231 or a sequence of amino acids that exhibits at least 85% sequence identity to SEQ ID NO: 229 or 231, and the variable light chain set forth in SEQ ID NO: 288, 289 or 291 or a sequence of amino acids that exhibits at least 85% sequence identity to SEQ ID NO: 288, 289 or 291;

[0076] dd) the variable heavy chain set forth in SEQ ID NO: 235 or 237 or a sequence of amino acids that exhibits at least 85% sequence identity to SEQ ID NO: 235 or 237, and the variable light chain set forth in SEQ ID NO: 295, 296 or 298 or a sequence of amino acids that exhibits at least 85% sequence identity to SEQ ID NO: 295, 296 or 298;

[0077] ee) the variable heavy chain set forth in SEQ ID NO: 247 or 249 or a sequence of amino acids that exhibits at least 85% sequence identity to SEQ ID NO: 247 or 249, and the variable light chain set forth in SEQ ID NO: 302, 303 or 305 or a sequence of amino acids that exhibits at least 85% sequence identity to SEQ ID NO: 302, 303 or 305;

[0078] ff) the variable heavy chain set forth in SEQ ID NO: 211 or 213 or a sequence of amino acids that exhibits at least 85% sequence identity to SEQ ID NO: 211 or 213, and the variable light chain set forth in SEQ ID NO: 302, 303 or 305 or a sequence of amino acids that exhibits at least 85% sequence identity to SEQ ID NO: 302, 303 or 305;

[0079] gg) the variable heavy chain set forth in SEQ ID NO: 211 or 213 or a sequence of amino acids that exhibits at least 85% sequence identity to SEQ ID NO: 211 or 213, and the variable light chain set forth in SEQ ID NO: 281, 282 or 284 or a sequence of amino acids that exhibits at least 85% sequence identity to SEQ ID NO: 281, 282 or 284;

[0080] hh) the variable heavy chain set forth in SEQ ID NO: 211 or 213 or a sequence of amino acids that exhibits at least 85% sequence identity to SEQ ID NO: 211 or 213, and the variable light chain set forth in SEQ ID NO: 288, 289 or 291 or a sequence of amino acids that exhibits at least 85% sequence identity to SEQ ID NO: 288, 289 or 291.

[0081] In some examples, an unmodified anti-EGFR antibody or antigen-binding fragment thereof, that has a variable heavy chain set forth in SEQ ID NO: 2 and a variable light chain set forth in SEQ ID NO: 4, is humanized and modified to generate a modified anti-EGFR antibody, or antigen-binding fragment thereof, that contains:

[0082] a) the variable heavy chain set forth in SEQ ID NO: 133 or a sequence of amino acids that exhibits at least 85% sequence identity to SEQ ID NO: 133, and the variable light chain set forth in SEQ ID NO: 156 or a sequence of amino acids that exhibits at least 85% sequence identity to SEQ ID NO: 156;

[0083] b) the variable heavy chain set forth in SEQ ID NO: 133 or a sequence of amino acids that exhibits at least 85% sequence identity to SEQ ID NO: 133, and the variable light chain set forth in SEQ ID NO: 163 or a sequence of amino acids that exhibits at least 85% sequence identity to SEQ ID NO: 163;

[0084] c) the variable heavy chain set forth in SEQ ID NO: 139 or a sequence of amino acids that exhibits at least 85% sequence identity to SEQ ID NO: 139, and the variable light chain set forth in SEQ ID NO: 156 or a sequence of amino acids that exhibits at least 85% sequence identity to SEQ ID NO: 156;

[0085] d) the variable heavy chain set forth in SEQ ID NO: 133 or a sequence of amino acids that exhibits at least 85% sequence identity to SEQ ID NO: 133, and the variable light chain set forth in SEQ ID NO: 170 or a sequence of amino acids that exhibits at least 85% sequence identity to SEQ ID NO: 170;

[0086] e) the variable heavy chain set forth in SEQ ID NO: 133 or a sequence of amino acids that exhibits at least 85% sequence identity to SEQ ID NO: 133, and the variable light chain set forth in SEQ ID NO: 177 or a sequence of amino acids that exhibits at least 85% sequence identity to SEQ ID NO: 177;

[0087] f) the variable heavy chain set forth in SEQ ID NO: 133 or a sequence of amino acids that exhibits at least 85% sequence identity to SEQ ID NO: 133 and the variable light chain set forth in SEQ ID NO: 184 or a sequence of amino acids that exhibits at least 85% sequence identity to SEQ ID NO: 184;

[0088] g) the variable heavy chain set forth in SEQ ID NO: 139 or a sequence of amino acids that exhibits at least 85% sequence identity to SEQ ID NO: 139, and the variable light chain set forth in SEQ ID NO: 184 or a sequence of amino acids that exhibits at least 85% sequence identity to SEQ ID NO: 184;

[0089] h) the variable heavy chain set forth in SEQ ID NO: 133 or a sequence of amino acids that exhibits at least 85% sequence identity to SEQ ID NO: 133, and the variable light chain set forth in SEQ ID NO: 191 or a sequence of amino acids that exhibits at least 85% sequence identity to SEQ ID NO: 191;

[0090] i) the variable heavy chain set forth in SEQ ID NO: 145 or a sequence of amino acids that exhibits at least 85% sequence identity to SEQ ID NO: 145, and the variable light chain set forth in SEQ ID NO: 184 or a sequence of amino acids that exhibits at least 85% sequence identity to SEQ ID NO: 184;

[0091] j) the variable heavy chain set forth in SEQ ID NO: 151 or a sequence of amino acids that exhibits at least 85% sequence identity to SEQ ID NO: 151, and the variable light chain set forth in SEQ ID NO: 198 or a sequence of amino acids that exhibits at least 85% sequence identity to SEQ ID NO: 198;

[0092] k) the variable heavy chain set forth in SEQ ID NO: 145 or a sequence of amino acids that exhibits at least 85% sequence identity to SEQ ID NO: 145, and the variable light chain set forth in SEQ ID NO: 198 or a sequence of amino acids that exhibits at least 85% sequence identity to SEQ ID NO: 198;

[0093] l) the variable heavy chain set forth in SEQ ID NO: 151 or a sequence of amino acids that exhibits at least 85% sequence identity to SEQ ID NO: 151, and the variable light chain set forth in SEQ ID NO: 205 or a sequence of amino acids that exhibits at least 85% sequence identity to SEQ ID NO: 205;

[0094] m) the variable heavy chain set forth in SEQ ID NO: 145 or a sequence of amino acids that exhibits at least 85% sequence identity to SEQ ID NO: 145, and the variable light chain set forth in SEQ ID NO: 205 or a sequence of amino acids that exhibits at least 85% sequence identity to SEQ ID NO: 205;

[0095] n) the variable heavy chain set forth in SEQ ID NO: 213 or a sequence of amino acids that exhibits at least 85% sequence identity to SEQ ID NO: 213, and the variable light chain set forth in SEQ ID NO: 254 or a sequence of amino acids that exhibits at least 85% sequence identity to SEQ ID NO: 254;

[0096] o) the variable heavy chain set forth in SEQ ID NO: 219 or a sequence of amino acids that exhibits at least 85% sequence identity to SEQ ID NO: 219, and the variable light chain set forth in SEQ ID NO: 254 or a sequence of amino acids that exhibits at least 85% sequence identity to SEQ ID NO: 254;

[0097] p) the variable heavy chain set forth in SEQ ID NO: 225 or a sequence of amino acids that exhibits at least 85% sequence identity to SEQ ID NO: 225, and the variable light chain set forth in SEQ ID NO: 261 or a sequence of amino acids that exhibits at least 85% sequence identity to SEQ ID NO: 261;

[0098] q) the variable heavy chain set forth in SEQ ID NO: 231 or a sequence of amino acids that exhibits at least 85% sequence identity to SEQ ID NO: 231, and the variable light chain set forth in SEQ ID NO: 261 or a sequence of amino acids that exhibits at least 85% sequence identity to SEQ ID NO: 261;

[0099] r) the variable heavy chain set forth in SEQ ID NO: 237 or a sequence of amino acids that exhibits at least 85% sequence identity to SEQ ID NO: 237, and the variable light chain set forth in SEQ ID NO: 268 or a sequence of amino acids that exhibits at least 85% sequence identity to SEQ ID NO: 268;

[0100] s) the variable heavy chain set forth in SEQ ID NO: 243 or a sequence of amino acids that exhibits at least 85% sequence identity to SEQ ID NO: 243, and the variable light chain set forth in SEQ ID NO: 275 or a sequence of amino acids that exhibits at least 85% sequence identity to SEQ ID NO: 275;

[0101] t) the variable heavy chain set forth in SEQ ID NO: 225 or a sequence of amino acids that exhibits at least 85% sequence identity to SEQ ID NO: 225, and the variable light chain set forth in SEQ ID NO: 275 or a sequence of amino acids that exhibits at least 85% sequence identity to SEQ ID NO: 275;

[0102] u) the variable heavy chain set forth in SEQ ID NO: 231 or a sequence of amino acids that exhibits at least 85% sequence identity to SEQ ID NO: 231, and the variable light chain set forth in SEQ ID NO: 275 or a sequence of amino acids that exhibits at least 85% sequence identity to SEQ ID NO: 275;

[0103] v) the variable heavy chain set forth in SEQ ID NO: 237 or a sequence of amino acids that exhibits at least 85% sequence identity to SEQ ID NO: 237, and the variable light chain set forth in SEQ ID NO: 282 or a sequence of amino acids that exhibits at least 85% sequence identity to SEQ ID NO: 282;

[0104] w) the variable heavy chain set forth in SEQ ID NO: 249 or a sequence of amino acids that exhibits at least 85% sequence identity to SEQ ID NO: 249, and the variable light chain set forth in SEQ ID NO: 282 or a sequence of amino acids that exhibits at least 85% sequence identity to SEQ ID NO: 282;

[0105] x) the variable heavy chain set forth in SEQ ID NO: 225 or a sequence of amino acids that exhibits at least 85% sequence identity to SEQ ID NO: 225, and the variable light chain set forth in SEQ ID NO: 282 or a sequence of amino acids that exhibits at least 85% sequence identity to SEQ ID NO: 282;

[0106] y) the variable heavy chain set forth in SEQ ID NO: 231 or a sequence of amino acids that exhibits at least 85% sequence identity to SEQ ID NO: 231, and the variable light chain set forth in SEQ ID NO: 282 or a sequence of amino acids that exhibits at least 85% sequence identity to SEQ ID NO: 282;

[0107] z) the variable heavy chain set forth in SEQ ID NO: 237 or a sequence of amino acids that exhibits at least 85% sequence identity to SEQ ID NO: 237, and the variable light chain set forth in SEQ ID NO: 289 or a sequence of amino acids that exhibits at least 85% sequence identity to SEQ ID NO: 289;

[0108] aa) the variable heavy chain set forth in SEQ ID NO: 249 or a sequence of amino acids that exhibits at least 85% sequence identity to SEQ ID NO: 249, and the variable light chain set forth in SEQ ID NO: 289 or a sequence of amino acids that exhibits at least 85% sequence identity to SEQ ID NO: 289;

[0109] bb) the variable heavy chain set forth in SEQ ID NO: 225 or a sequence of amino acids that exhibits at least 85% sequence identity to SEQ ID NO: 225, and the variable light chain set forth in SEQ ID NO: 289 or a sequence of amino acids that exhibits at least 85% sequence identity to SEQ ID NO: 289;

[0110] cc) the variable heavy chain set forth in SEQ ID NO: 231 or a sequence of amino acids that exhibits at least 85% sequence identity to SEQ ID NO: 231, and the variable light chain set forth in SEQ ID NO: 289 or a sequence of amino acids that exhibits at least 85% sequence identity to SEQ ID NO: 289;

[0111] dd) the variable heavy chain set forth in SEQ ID NO: 237 or a sequence of amino acids that exhibits at least 85% sequence identity to SEQ ID NO: 237, and the variable light chain set forth in SEQ ID NO: 296 or a sequence of amino acids that exhibits at least 85% sequence identity to SEQ ID NO: 296;

[0112] ee) the variable heavy chain set forth in SEQ ID NO: 249 or a sequence of amino acids that exhibits at least 85% sequence identity to SEQ ID NO: 249, and the variable light chain set forth in SEQ ID NO: 303 or a sequence of amino acids that exhibits at least 85% sequence identity to SEQ ID NO: 303;

[0113] ff) the variable heavy chain set forth in SEQ ID NO: 213 or a sequence of amino acids that exhibits at least 85% sequence identity to SEQ ID NO: 213, and the variable light chain set forth in SEQ ID NO: 303 or a sequence of amino acids that exhibits at least 85% sequence identity to SEQ ID NO: 303;

[0114] gg) the variable heavy chain set forth in SEQ ID NO: 213 or a sequence of amino acids that exhibits at least 85% sequence identity to SEQ ID NO: 213, and the variable light chain set forth in SEQ ID NO: 282 or a sequence of amino acids that exhibits at least 85% sequence identity to SEQ ID NO: 282;

[0115] hh) the variable heavy chain set forth in SEQ ID NO: 213 or a sequence of amino acids that exhibits at least 85% sequence identity to SEQ ID NO: 213, and the variable light chain set forth in SEQ ID NO: 289 or a sequence of amino acids that exhibits at least 85% sequence identity to SEQ ID NO: 289.

[0116] In other examples, an unmodified anti-EGFR antibody or antigen-binding fragment thereof, that has a variable heavy chain set forth in SEQ ID NO: 7 and a variable light chain set forth in SEQ ID NO: 9, is humanized and modified to generate a modified anti-EGFR antibody, or antigen-binding fragment thereof, that contains:

[0117] a) the variable heavy chain set forth in SEQ ID NO: 131 or a sequence of amino acids that exhibits at least 85% sequence identity to SEQ ID NO: 131, and the variable light chain set forth in SEQ ID NO: 155 or a sequence of amino acids that exhibits at least 85% sequence identity to SEQ ID NO: 155;

[0118] b) the variable heavy chain set forth in SEQ ID NO: 131 or a sequence of amino acids that exhibits at least 85% sequence identity to SEQ ID NO: 131, and the variable light chain set forth in SEQ ID NO: 162, or a sequence of amino acids that exhibits at least 85% sequence identity to SEQ ID NO: 162;

[0119] c) the variable heavy chain set forth in SEQ ID NO: 137 or a sequence of amino acids that exhibits at least 85% sequence identity to SEQ ID NO: 137, and the variable light chain set forth in SEQ ID NO: 155 or a sequence of amino acids that exhibits at least 85% sequence identity to SEQ ID NO: 155;

[0120] d) the variable heavy chain set forth in SEQ ID NO: 131 or a sequence of amino acids that exhibits at least 85% sequence identity to SEQ ID NO: 131, and the variable light chain set forth in SEQ ID NO: 169 or a sequence of amino acids that exhibits at least 85% sequence identity to SEQ ID NO: 169;

[0121] e) the variable heavy chain set forth in SEQ ID NO: 131 or a sequence of amino acids that exhibits at least 85% sequence identity to SEQ ID NO: 131, and the variable light chain set forth in SEQ ID NO: 176 or a sequence of amino acids that exhibits at least 85% sequence identity to SEQ ID NO: 176;

[0122] f) the variable heavy chain set forth in SEQ ID NO: 131 or a sequence of amino acids that exhibits at least 85% sequence identity to SEQ ID NO: 131 and the variable light chain set forth in SEQ ID NO: 183 or a sequence of amino acids that exhibits at least 85% sequence identity to SEQ ID NO: 183;

[0123] g) the variable heavy chain set forth in SEQ ID NO: 137 or a sequence of amino acids that exhibits at least 85% sequence identity to SEQ ID NO: 137, and the variable light chain set forth in SEQ ID NO: 183 or a sequence of amino acids that exhibits at least 85% sequence identity to SEQ ID NO: 183;

[0124] h) the variable heavy chain set forth in SEQ ID NO: 131 or a sequence of amino acids that exhibits at least 85% sequence identity to SEQ ID NO: 131, and the variable light chain set forth in SEQ ID NO: 190 or a sequence of amino acids that exhibits at least 85% sequence identity to SEQ ID NO: 190;

[0125] i) the variable heavy chain set forth in SEQ ID NO: 143 or a sequence of amino acids that exhibits at least 85% sequence identity to SEQ ID NO: 143, and the variable light chain set forth in SEQ ID NO: 183 or a sequence of amino acids that exhibits at least 85% sequence identity to SEQ ID NO: 183;

[0126] j) the variable heavy chain set forth in SEQ ID NO: 149 or a sequence of amino acids that exhibits at least 85% sequence identity to SEQ ID NO: 149, and the variable light chain set forth in SEQ ID NO: 197 or a sequence of amino acids that exhibits at least 85% sequence identity to SEQ ID NO: 197;

[0127] k) the variable heavy chain set forth in SEQ ID NO: 143 or a sequence of amino acids that exhibits at least 85% sequence identity to SEQ ID NO: 143, and the variable light chain set forth in SEQ ID NO: 197 or a sequence of amino acids that exhibits at least 85% sequence identity to SEQ ID NO: 197;

[0128] l) the variable heavy chain set forth in SEQ ID NO: 149 or a sequence of amino acids that exhibits at least 85% sequence identity to SEQ ID NO: 149, and the variable light chain set forth in SEQ ID NO: 204 or a sequence of amino acids that exhibits at least 85% sequence identity to SEQ ID NO: 204;

[0129] m) the variable heavy chain set forth in SEQ ID NO: 143 or a sequence of amino acids that exhibits at least 85% sequence identity to SEQ ID NO: 143, and the variable light chain set forth in SEQ ID NO: 204 or a sequence of amino acids that exhibits at least 85% sequence identity to SEQ ID NO: 204;

[0130] n) the variable heavy chain set forth in SEQ ID NO: 211 or a sequence of amino acids that exhibits at least 85% sequence identity to SEQ ID NO: 211, and the variable light chain set forth in SEQ ID NO: 253 or a sequence of amino acids that exhibits at least 85% sequence identity to SEQ ID NO: 253;

[0131] o) the variable heavy chain set forth in SEQ ID NO: 217 or a sequence of amino acids that exhibits at least 85% sequence identity to SEQ ID NO: 217, and the variable light chain set forth in SEQ ID NO: 253 or a sequence of amino acids that exhibits at least 85% sequence identity to SEQ ID NO: 253;

[0132] p) the variable heavy chain set forth in SEQ ID NO: 223 or a sequence of amino acids that exhibits at least 85% sequence identity to SEQ ID NO: 223, and the variable light chain set forth in SEQ ID NO: 260 or a sequence of amino acids that exhibits at least 85% sequence identity to SEQ ID NO: 260;

[0133] q) the variable heavy chain set forth in SEQ ID NO: 229 or a sequence of amino acids that exhibits at least 85% sequence identity to SEQ ID NO: 229, and the variable light chain set forth in SEQ ID NO: 260 or a sequence of amino acids that exhibits at least 85% sequence identity to SEQ ID NO: 260;

[0134] r) the variable heavy chain set forth in SEQ ID NO: 235 or a sequence of amino acids that exhibits at least 85% sequence identity to SEQ ID NO: 235, and the variable light chain set forth in SEQ ID NO: 267 or a sequence of amino acids that exhibits at least 85% sequence identity to SEQ ID NO: 267;

[0135] s) the variable heavy chain set forth in SEQ ID NO: 241 or a sequence of amino acids that exhibits at least 85% sequence identity to SEQ ID NO: 241, and the variable light chain set forth in SEQ ID NO: 274 or a sequence of amino acids that exhibits at least 85% sequence identity to SEQ ID NO: 274;

[0136] t) the variable heavy chain set forth in SEQ ID NO: 223 or a sequence of amino acids that exhibits at least 85% sequence identity to SEQ ID NO: 223, and the variable light chain set forth in SEQ ID NO: 274 or a sequence of amino acids that exhibits at least 85% sequence identity to SEQ ID NO: 274;

[0137] u) the variable heavy chain set forth in SEQ ID NO: 229 or a sequence of amino acids that exhibits at least 85% sequence identity to SEQ ID NO: 229, and the variable light chain set forth in SEQ ID NO: 274 or a sequence of amino acids that exhibits at least 85% sequence identity to SEQ ID NO: 274;

[0138] v) the variable heavy chain set forth in SEQ ID NO: 235 or a sequence of amino acids that exhibits at least 85% sequence identity to SEQ ID NO: 235, and the variable light chain set forth in SEQ ID NO: 281 or a sequence of amino acids that exhibits at least 85% sequence identity to SEQ ID NO: 281;

[0139] w) the variable heavy chain set forth in SEQ ID NO: 247 or a sequence of amino acids that exhibits at least 85% sequence identity to SEQ ID NO: 247, and the variable light chain set forth in SEQ ID NO: 281 or a sequence of amino acids that exhibits at least 85% sequence identity to SEQ ID NO: 281;

[0140] x) the variable heavy chain set forth in SEQ ID NO: 223 or a sequence of amino acids that exhibits at least 85% sequence identity to SEQ ID NO: 223, and the variable light chain set forth in SEQ ID NO: 281 or a sequence of amino acids that exhibits at least 85% sequence identity to SEQ ID NO: 281;

[0141] y) the variable heavy chain set forth in SEQ ID NO: 229 or a sequence of amino acids that exhibits at least 85% sequence identity to SEQ ID NO: 229, and the variable light chain set forth in SEQ ID NO: 281 or a sequence of amino acids that exhibits at least 85% sequence identity to SEQ ID NO: 281;

[0142] z) the variable heavy chain set forth in SEQ ID NO: 235 or a sequence of amino acids that exhibits at least 85% sequence identity to SEQ ID NO: 235, and the variable light chain set forth in SEQ ID NO: 288 or a sequence of amino acids that exhibits at least 85% sequence identity to SEQ ID NO: 288;

[0143] aa) the variable heavy chain set forth in SEQ ID NO: 247 or a sequence of amino acids that exhibits at least 85% sequence identity to SEQ ID NO: 247, and the variable light chain set forth in SEQ ID NO: 288 or a sequence of amino acids that exhibits at least 85% sequence identity to SEQ ID NO: 288;

[0144] bb) the variable heavy chain set forth in SEQ ID NO: 223 or a sequence of amino acids that exhibits at least 85% sequence identity to SEQ ID NO: 223, and the variable light chain set forth in SEQ ID NO: 288 or a sequence of amino acids that exhibits at least 85% sequence identity to SEQ ID NO: 288;

[0145] cc) the variable heavy chain set forth in SEQ ID NO: 229 or a sequence of amino acids that exhibits at least 85% sequence identity to SEQ ID NO: 229, and the variable light chain set forth in SEQ ID NO: 288 or a sequence of amino acids that exhibits at least 85% sequence identity to SEQ ID NO: 288;

[0146] dd) the variable heavy chain set forth in SEQ ID NO: 235 or a sequence of amino acids that exhibits at least 85% sequence identity to SEQ ID NO: 235, and the variable light chain set forth in SEQ ID NO: 295 or a sequence of amino acids that exhibits at least 85% sequence identity to SEQ ID NO: 295;

[0147] ee) the variable heavy chain set forth in SEQ ID NO: 247 or a sequence of amino acids that exhibits at least 85% sequence identity to SEQ ID NO: 247, and the variable light chain set forth in SEQ ID NO: 302 or a sequence of amino acids that exhibits at least 85% sequence identity to SEQ ID NO: 302;

[0148] ff) the variable heavy chain set forth in SEQ ID NO: 211 or a sequence of amino acids that exhibits at least 85% sequence identity to SEQ ID NO: 211, and the variable light chain set forth in SEQ ID NO: 302 or a sequence of amino acids that exhibits at least 85% sequence identity to SEQ ID NO: 302;

[0149] gg) the variable heavy chain set forth in SEQ ID NO: 211 or a sequence of amino acids that exhibits at least 85% sequence identity to SEQ ID NO: 211, and the variable light chain set forth in SEQ ID NO: 281 or a sequence of amino acids that exhibits at least 85% sequence identity to SEQ ID NO: 281; and

[0150] hh) the variable heavy chain set forth in SEQ ID NO: 211 or a sequence of amino acids that exhibits at least 85% sequence identity to SEQ ID NO: 211, and the variable light chain set forth in SEQ ID NO: 288 or a sequence of amino acids that exhibits at least 85% sequence identity to SEQ ID NO: 288.

[0151] In further examples, an unmodified anti-EGFR antibody or antigen-binding fragment thereof, that has a variable heavy chain set forth in SEQ ID NO: 7 and a variable light chain set forth in SEQ ID NO: 11, is humanized and modified to generate a modified anti-EGFR antibody, or antigen-binding fragment thereof, that contains:

[0152] a) the variable heavy chain set forth in SEQ ID NO: 131 or a sequence of amino acids that exhibits at least 85% sequence identity to SEQ ID NO: 131, and the variable light chain set forth in SEQ ID NO: 158 or a sequence of amino acids that exhibits at least 85% sequence identity to SEQ ID NO: 158;

[0153] b) the variable heavy chain set forth in SEQ ID NO: 131 or a sequence of amino acids that exhibits at least 85% sequence identity to SEQ ID NO: 131, and the variable light chain set forth in SEQ ID NO: 165, or a sequence of amino acids that exhibits at least 85% sequence identity to SEQ ID NO: 165;

[0154] c) the variable heavy chain set forth in SEQ ID NO: 137 or a sequence of amino acids that exhibits at least 85% sequence identity to SEQ ID NO: 137, and the variable light chain set forth in SEQ ID NO: 158 or a sequence of amino acids that exhibits at least 85% sequence identity to SEQ ID NO: 158;

[0155] d) the variable heavy chain set forth in SEQ ID NO: 131 or a sequence of amino acids that exhibits at least 85% sequence identity to SEQ ID NO: 131, and the variable light chain set forth in SEQ ID NO: 172 or a sequence of amino acids that exhibits at least 85% sequence identity to SEQ ID NO: 172;

[0156] e) the variable heavy chain set forth in SEQ ID NO: 131 or a sequence of amino acids that exhibits at least 85% sequence identity to SEQ ID NO: 131, and the variable light chain set forth in SEQ ID NO: 179 or a sequence of amino acids that exhibits at least 85% sequence identity to SEQ ID NO: 179;

[0157] f) the variable heavy chain set forth in SEQ ID NO: 131 or a sequence of amino acids that exhibits at least 85% sequence identity to SEQ ID NO: 131 and the variable light chain set forth in SEQ ID NO: 186 or a sequence of amino acids that exhibits at least 85% sequence identity to SEQ ID NO: 186;

[0158] g) the variable heavy chain set forth in SEQ ID NO: 137 or a sequence of amino acids that exhibits at least 85% sequence identity to SEQ ID NO: 137, and the variable light chain set forth in SEQ ID NO: 186 or a sequence of amino acids that exhibits at least 85% sequence identity to SEQ ID NO: 186;

[0159] h) the variable heavy chain set forth in SEQ ID NO: 131 or a sequence of amino acids that exhibits at least 85% sequence identity to SEQ ID NO: 131, and the variable light chain set forth in SEQ ID NO: 193 or a sequence of amino acids that exhibits at least 85% sequence identity to SEQ ID NO: 193;

[0160] i) the variable heavy chain set forth in SEQ ID NO: 143 or a sequence of amino acids that exhibits at least 85% sequence identity to SEQ ID NO: 143, and the variable light chain set forth in SEQ ID NO: 186 or a sequence of amino acids that exhibits at least 85% sequence identity to SEQ ID NO: 186;

[0161] j) the variable heavy chain set forth in SEQ ID NO: 149 or a sequence of amino acids that exhibits at least 85% sequence identity to SEQ ID NO: 149, and the variable light chain set forth in SEQ ID NO: 200 or a sequence of amino acids that exhibits at least 85% sequence identity to SEQ ID NO: 200;

[0162] k) the variable heavy chain set forth in SEQ ID NO: 143 or a sequence of amino acids that exhibits at least 85% sequence identity to SEQ ID NO: 143, and the variable light chain set forth in SEQ ID NO: 200 or a sequence of amino acids that exhibits at least 85% sequence identity to SEQ ID NO: 200;

[0163] l) the variable heavy chain set forth in SEQ ID NO: 149 or a sequence of amino acids that exhibits at least 85% sequence identity to SEQ ID NO: 149, and the variable light chain set forth in SEQ ID NO: 207 or a sequence of amino acids that exhibits at least 85% sequence identity to SEQ ID NO: 207;

[0164] m) the variable heavy chain set forth in SEQ ID NO: 143 or a sequence of amino acids that exhibits at least 85% sequence identity to SEQ ID NO: 143, and the variable light chain set forth in SEQ ID NO: 207 or a sequence of amino acids that exhibits at least 85% sequence identity to SEQ ID NO: 207;

[0165] n) the variable heavy chain set forth in SEQ ID NO: 211 or a sequence of amino acids that exhibits at least 85% sequence identity to SEQ ID NO: 211, and the variable light chain set forth in SEQ ID NO: 256 or a sequence of amino acids that exhibits at least 85% sequence identity to SEQ ID NO: 256;

[0166] o) the variable heavy chain set forth in SEQ ID NO: 217 or a sequence of amino acids that exhibits at least 85% sequence identity to SEQ ID NO: 217, and the variable light chain set forth in SEQ ID NO: 256 or a sequence of amino acids that exhibits at least 85% sequence identity to SEQ ID NO: 256;

[0167] p) the variable heavy chain set forth in SEQ ID NO: 223 or a sequence of amino acids that exhibits at least 85% sequence identity to SEQ ID NO: 223, and the variable light chain set forth in SEQ ID NO: 263 or a sequence of amino acids that exhibits at least 85% sequence identity to SEQ ID NO: 263;

[0168] q) the variable heavy chain set forth in SEQ ID NO: 229 or a sequence of amino acids that exhibits at least 85% sequence identity to SEQ ID NO: 229, and the variable light chain set forth in SEQ ID NO: 263 or a sequence of amino acids that exhibits at least 85% sequence identity to SEQ ID NO: 263;

[0169] r) the variable heavy chain set forth in SEQ ID NO: 235 or a sequence of amino acids that exhibits at least 85% sequence identity to SEQ ID NO: 235, and the variable light chain set forth in SEQ ID NO: 270 or a sequence of amino acids that exhibits at least 85% sequence identity to SEQ ID NO: 270;

[0170] s) the variable heavy chain set forth in SEQ ID NO: 241 or a sequence of amino acids that exhibits at least 85% sequence identity to SEQ ID NO: 241, and the variable light chain set forth in SEQ ID NO: 277 or a sequence of amino acids that exhibits at least 85% sequence identity to SEQ ID NO: 277;

[0171] t) the variable heavy chain set forth in SEQ ID NO: 223 or a sequence of amino acids that exhibits at least 85% sequence identity to SEQ ID NO: 223, and the variable light chain set forth in SEQ ID NO: 277 or a sequence of amino acids that exhibits at least 85% sequence identity to SEQ ID NO: 277;

[0172] u) the variable heavy chain set forth in SEQ ID NO: 229 or a sequence of amino acids that exhibits at least 85% sequence identity to SEQ ID NO: 229, and the variable light chain set forth in SEQ ID NO: 277 or a sequence of amino acids that exhibits at least 85% sequence identity to SEQ ID NO: 277;

[0173] v) the variable heavy chain set forth in SEQ ID NO: 235 or a sequence of amino acids that exhibits at least 85% sequence identity to SEQ ID NO: 235, and the variable light chain set forth in SEQ ID NO: 284 or a sequence of amino acids that exhibits at least 85% sequence identity to SEQ ID NO: 284;

[0174] w) the variable heavy chain set forth in SEQ ID NO: 247 or a sequence of amino acids that exhibits at least 85% sequence identity to SEQ ID NO: 247, and the variable light chain set forth in SEQ ID NO: 284 or a sequence of amino acids that exhibits at least 85% sequence identity to SEQ ID NO: 284;

[0175] x) the variable heavy chain set forth in SEQ ID NO: 223 or a sequence of amino acids that exhibits at least 85% sequence identity to SEQ ID NO: 223, and the variable light chain set forth in SEQ ID NO: 284 or a sequence of amino acids that exhibits at least 85% sequence identity to SEQ ID NO: 284;

[0176] y) the variable heavy chain set forth in SEQ ID NO: 229 or a sequence of amino acids that exhibits at least 85% sequence identity to SEQ ID NO: 229, and the variable light chain set forth in SEQ ID NO: 284 or a sequence of amino acids that exhibits at least 85% sequence identity to SEQ ID NO: 284;

[0177] z) the variable heavy chain set forth in SEQ ID NO: 235 or a sequence of amino acids that exhibits at least 85% sequence identity to SEQ ID NO: 235, and the variable light chain set forth in SEQ ID NO: 291 or a sequence of amino acids that exhibits at least 85% sequence identity to SEQ ID NO: 291;

[0178] aa) the variable heavy chain set forth in SEQ ID NO: 247 or a sequence of amino acids that exhibits at least 85% sequence identity to SEQ ID NO: 247, and the variable light chain set forth in SEQ ID NO: 291 or a sequence of amino acids that exhibits at least 85% sequence identity to SEQ ID NO: 291;

[0179] bb) the variable heavy chain set forth in SEQ ID NO: 223 or a sequence of amino acids that exhibits at least 85% sequence identity to SEQ ID NO: 223, and the variable light chain set forth in SEQ ID NO: 291 or a sequence of amino acids that exhibits at least 85% sequence identity to SEQ ID NO: 291;

[0180] cc) the variable heavy chain set forth in SEQ ID NO: 229 or a sequence of amino acids that exhibits at least 85% sequence identity to SEQ ID NO: 229, and the variable light chain set forth in SEQ ID NO: 291 or a sequence of amino acids that exhibits at least 85% sequence identity to SEQ ID NO: 291;

[0181] dd) the variable heavy chain set forth in SEQ ID NO: 235 or a sequence of amino acids that exhibits at least 85% sequence identity to SEQ ID NO: 235, and the variable light chain set forth in SEQ ID NO: 298 or a sequence of amino acids that exhibits at least 85% sequence identity to SEQ ID NO: 298;

[0182] ee) the variable heavy chain set forth in SEQ ID NO: 247 or a sequence of amino acids that exhibits at least 85% sequence identity to SEQ ID NO: 247, and the variable light chain set forth in SEQ ID NO: 305 or a sequence of amino acids that exhibits at least 85% sequence identity to SEQ ID NO: 305;

[0183] ff) the variable heavy chain set forth in SEQ ID NO: 211 or a sequence of amino acids that exhibits at least 85% sequence identity to SEQ ID NO: 211, and the variable light chain set forth in SEQ ID NO: 305 or a sequence of amino acids that exhibits at least 85% sequence identity to SEQ ID NO: 305;

[0184] gg) the variable heavy chain set forth in SEQ ID NO: 211 or a sequence of amino acids that exhibits at least 85% sequence identity to SEQ ID NO: 211, and the variable light chain set forth in SEQ ID NO: 284 or a sequence of amino acids that exhibits at least 85% sequence identity to SEQ ID NO: 284;

[0185] hh) the variable heavy chain set forth in SEQ ID NO: 211 or a sequence of amino acids that exhibits at least 85% sequence identity to SEQ ID NO: 211, and the variable light chain set forth in SEQ ID NO: 291 or a sequence of amino acids that exhibits at least 85% sequence identity to SEQ ID NO: 291.

[0186] Also included among any of modified anti-EGFR antibodies, or antigen-binding fragments thereof, are any humanized, modified anti-EGFR antibodies, or antigen-binding fragments thereof, that exhibit at least 86%, 87%, 88%, 89%, 90%, 91%, 92%, 93%, 94%, 95%, 96%, 97%, 98%, 99% or more sequence identity to any of the humanized, modified anti-EGFR antibodies described herein above. Sequence identity can be determined using global alignment with or without gaps.

[0187] In some examples, the humanized, modified anti-EGFR antibody, or antigen-binding fragment thereof, is a full-length antibody that contains:

[0188] a) the heavy chain set forth in SEQ ID NO: 129 or a sequence of amino acids that exhibits at least 85% sequence identity to SEQ ID NO: 129, and the light chain set forth in SEQ ID NO: 153 or a sequence of amino acids that exhibits at least 85% sequence identity to SEQ ID NO: 153;

[0189] b) the heavy chain set forth in SEQ ID NO: 129 or a sequence of amino acids that exhibits at least 85% sequence identity to SEQ ID NO: 129, and the light chain set forth in SEQ ID NO: 160 or a sequence of amino acids that exhibits at least 85% sequence identity to SEQ ID NO: 160;

[0190] c) the heavy chain set forth in SEQ ID NO: 135 or a sequence of amino acids that exhibits at least 85% sequence identity to SEQ ID NO: 135, and the light chain set forth in SEQ ID NO: 153 or a sequence of amino acids that exhibits at least 85% sequence identity to SEQ ID NO: 153;

[0191] d) the heavy chain set forth in SEQ ID NO: 129 or a sequence of amino acids that exhibits at least 85% sequence identity to SEQ ID NO: 129, and the light chain set forth in SEQ ID NO: 167 or a sequence of amino acids that exhibits at least 85% sequence identity to SEQ ID NO: 167;

[0192] e) the heavy chain set forth in SEQ ID NO: 129 or a sequence of amino acids that exhibits at least 85% sequence identity to SEQ ID NO: 129, and the light chain set forth in SEQ ID NO: 174 or a sequence of amino acids that exhibits at least 85% sequence identity to SEQ ID NO: 174;

[0193] f) the heavy chain set forth in SEQ ID NO: 129 or a sequence of amino acids that exhibits at least 85% sequence identity to SEQ ID NO: 129, and the light chain set forth in SEQ ID NO: 181 or a sequence of amino acids that exhibits at least 85% sequence identity to SEQ ID NO: 181;

[0194] g) the heavy chain set forth in SEQ ID NO: 135 or a sequence of amino acids that exhibits at least 85% sequence identity to SEQ ID NO: 135, and the light chain set forth in SEQ ID NO: 181 or a sequence of amino acids that exhibits at least 85% sequence identity to SEQ ID NO: 181;

[0195] h) the heavy chain set forth in SEQ ID NO: 129 or a sequence of amino acids that exhibits at least 85% sequence identity to SEQ ID NO: 129, and the light chain set forth in SEQ ID NO: 188 or a sequence of amino acids that exhibits at least 85% sequence identity to SEQ ID NO: 188;

[0196] i) the heavy chain set forth in SEQ ID NO: 141 or a sequence of amino acids that exhibits at least 85% sequence identity to SEQ ID NO: 141, and the light chain set forth in SEQ ID NO: 181 or a sequence of amino acids that exhibits at least 85% sequence identity to SEQ ID NO: 181;

[0197] j) the heavy chain set forth in SEQ ID NO: 147 or a sequence of amino acids that exhibits at least 85% sequence identity to SEQ ID NO: 147, and the light chain set forth in SEQ ID NO: 195 or a sequence of amino acids that exhibits at least 85% sequence identity to SEQ ID NO: 195;

[0198] k) the heavy chain set forth in SEQ ID NO: 141 or a sequence of amino acids that exhibits at least 85% sequence identity to SEQ ID NO: 141, and the light chain set forth in SEQ ID NO: 195 or a sequence of amino acids that exhibits at least 85% sequence identity to SEQ ID NO: 195;

[0199] l) the heavy chain set forth in SEQ ID NO: 147 or a sequence of amino acids that exhibits at least 85% sequence identity to SEQ ID NO: 147, and the light chain set forth in SEQ ID NO: 202 or a sequence of amino acids that exhibits at least 85% sequence identity to SEQ ID NO: 202;

[0200] m) the heavy chain set forth in SEQ ID NO: 141 or a sequence of amino acids that exhibits at least 85% sequence identity to SEQ ID NO: 141, and the light chain set forth in SEQ ID NO: 202 or a sequence of amino acids that exhibits at least 85% sequence identity to SEQ ID NO: 202;

[0201] n) the heavy chain set forth in SEQ ID NO: 209 or a sequence of amino acids that exhibits at least 85% sequence identity to SEQ ID NO: 209, and the light chain set forth in SEQ ID NO: 251 or a sequence of amino acids that exhibits at least 85% sequence identity to SEQ ID NO: 251;

[0202] o) the heavy chain set forth in SEQ ID NO: 215 or a sequence of amino acids that exhibits at least 85% sequence identity to SEQ ID NO: 215, and the light chain set forth in SEQ ID NO: 251 or a sequence of amino acids that exhibits at least 85% sequence identity to SEQ ID NO: 251;

[0203] p) the heavy chain set forth in SEQ ID NO: 221 or a sequence of amino acids that exhibits at least 85% sequence identity to SEQ ID NO: 221, and the light chain set forth in SEQ ID NO: 258 or a sequence of amino acids that exhibits at least 85% sequence identity to SEQ ID NO: 258;

[0204] q) the heavy chain set forth in SEQ ID NO: 227 or a sequence of amino acids that exhibits at least 85% sequence identity to SEQ ID NO: 227, and the light chain set forth in SEQ ID NO: 258 or a sequence of amino acids that exhibits at least 85% sequence identity to SEQ ID NO: 258;

[0205] r) the heavy chain set forth in SEQ ID NO: 233 or a sequence of amino acids that exhibits at least 85% sequence identity to SEQ ID NO: 233, and the light chain set forth in SEQ ID NO: 265 or a sequence of amino acids that exhibits at least 85% sequence identity to SEQ ID NO: 265;

[0206] s) the heavy chain set forth in SEQ ID NO: 239 or a sequence of amino acids that exhibits at least 85% sequence identity to SEQ ID NO: 239, and the light chain set forth in SEQ ID NO: 272 or a sequence of amino acids that exhibits at least 85% sequence identity to SEQ ID NO: 272;

[0207] t) the heavy chain set forth in SEQ ID NO: 221 or a sequence of amino acids that exhibits at least 85% sequence identity to SEQ ID NO: 221, and the light chain set forth in SEQ ID NO: 272 or a sequence of amino acids that exhibits at least 85% sequence identity to SEQ ID NO: 272;

[0208] u) the heavy chain set forth in SEQ ID NO: 227 or a sequence of amino acids that exhibits at least 85% sequence identity to SEQ ID NO: 227, and the light chain set forth in SEQ ID NO: 272 or a sequence of amino acids that exhibits at least 85% sequence identity to SEQ ID NO: 272;

[0209] v) the heavy chain set forth in SEQ ID NO: 233 or a sequence of amino acids that exhibits at least 85% sequence identity to SEQ ID NO: 233, and the light chain set forth in SEQ ID NO: 279 or a sequence of amino acids that exhibits at least 85% sequence identity to SEQ ID NO: 279;

[0210] w) the heavy chain set forth in SEQ ID NO: 245 or a sequence of amino acids that exhibits at least 85% sequence identity to SEQ ID NO: 245, and the light chain set forth in SEQ ID NO: 279 or a sequence of amino acids that exhibits at least 85% sequence identity to SEQ ID NO: 279;

[0211] x) the heavy chain set forth in SEQ ID NO: 221 or a sequence of amino acids that exhibits at least 85% sequence identity to SEQ ID NO: 221, and the light chain set forth in SEQ ID NO: 279 or a sequence of amino acids that exhibits at least 85% sequence identity to SEQ ID NO: 279;

[0212] y) the heavy chain set forth in SEQ ID NO: 227 or a sequence of amino acids that exhibits at least 85% sequence identity to SEQ ID NO: 227, and the light chain set forth in SEQ ID NO: 279 or a sequence of amino acids that exhibits at least 85% sequence identity to SEQ ID NO: 279;

[0213] z) the heavy chain set forth in SEQ ID NO: 233 or a sequence of amino acids that exhibits at least 85% sequence identity to SEQ ID NO: 233, and the light chain set forth in SEQ ID NO: 286 or a sequence of amino acids that exhibits at least 85% sequence identity to SEQ ID NO: 286;

[0214] aa) the heavy chain set forth in SEQ ID NO: 245 or a sequence of amino acids that exhibits at least 85% sequence identity to SEQ ID NO: 245, and the light chain set forth in SEQ ID NO: 286 or a sequence of amino acids that exhibits at least 85% sequence identity to SEQ ID NO: 286;

[0215] bb) the heavy chain set forth in SEQ ID NO: 221 or a sequence of amino acids that exhibits at least 85% sequence identity to SEQ ID NO: 221, and the light chain set forth in SEQ ID NO: 286 or a sequence of amino acids that exhibits at least 85% sequence identity to SEQ ID NO: 286;

[0216] cc) the heavy chain set forth in SEQ ID NO: 227 or a sequence of amino acids that exhibits at least 85% sequence identity to SEQ ID NO: 227, and the light chain set forth in SEQ ID NO: 286 or a sequence of amino acids that exhibits at least 85% sequence identity to SEQ ID NO: 286;

[0217] dd) the heavy chain set forth in SEQ ID NO: 233 or a sequence of amino acids that exhibits at least 85% sequence identity to SEQ ID NO: 233, and the light chain set forth in SEQ ID NO: 293 or a sequence of amino acids that exhibits at least 85% sequence identity to SEQ ID NO: 293;

[0218] ee) the heavy chain set forth in SEQ ID NO: 245 or a sequence of amino acids that exhibits at least 85% sequence identity to SEQ ID NO: 245, and the light chain set forth in SEQ ID NO: 300 or a sequence of amino acids that exhibits at least 85% sequence identity to SEQ ID NO: 300;

[0219] ff) the heavy chain set forth in SEQ ID NO: 209 or a sequence of amino acids that exhibits at least 85% sequence identity to SEQ ID NO: 209, and the light chain set forth in SEQ ID NO: 300 or a sequence of amino acids that exhibits at least 85% sequence identity to SEQ ID NO: 300;

[0220] gg) the heavy chain set forth in SEQ ID NO: 209 or a sequence of amino acids that exhibits at least 85% sequence identity to SEQ ID NO: 209, and the light chain set forth in SEQ ID NO: 279 or a sequence of amino acids that exhibits at least 85% sequence identity to SEQ ID NO: 279; and

[0221] hh) the heavy chain set forth in SEQ ID NO: 209 or a sequence of amino acids that exhibits at least 85% sequence identity to SEQ ID NO: 209, and the light chain set forth in SEQ ID NO: 286 or a sequence of amino acids that exhibits at least 85% sequence identity to SEQ ID NO: 286.

[0222] In any of the examples of modified anti-EGFR antibodies, or antigen-binding fragments thereof, provided herein, the antibody or antigen binding fragment can exhibit a ratio of binding activity for EGFR of greater than 1.0 in the presence of one or both of a pH that is pH 6.0 to 6.5, inclusive, an/or a lactate concentration of 15 mM to 20 mM, inclusive, compared to in the presence of one or both of or about pH 7.4 and/or a lactate concentration of or about 1 mM, when measured under the same conditions except for the difference in pH and lactate concentration. In some examples, the modified anti-EGFR antibody exhibits a ratio of binding activity for EGFR of greater than 1.0 in the presence of a pH that is pH 6.0 to 6.5, inclusive, compared to in the presence of or about pH 7.4, when measured under the same conditions except for the difference in pH. In such examples, the ratio of binding activity can be at least 1.1, 1.2, 1.3, 1.4, 1.5, 1.6, 1.7, 1.8, 1.9, 2.0, 2.5, 3.0, 4.0, 4.5, 5.0, 6.0. 7.0, 8.0, 9.0, 10.0, 15.0, 20.0, 25.0, 30.0, 35.0, 40.0, 50.0 or greater. In particular examples, the ratio of binding activity is at least 3.0, 4.0, 5.0, 6.0. 7.0, 8.0, 9.0, 10.0, 15.0, 20.0, 25.0, 30.0, 35.0, 40.0, 50.0 or greater.

[0223] In any of the examples herein, the binding affinity of the modified anti-EGFR antibodies or antigen-binding fragments provided herein is measured in terms of the dissociation constant (K_{d}) for binding EGFR or a soluble fragment thereof. In such examples, the modified anti-EGFR antibodies or antigen-binding fragments provided herein can have a binding affinity (K_{d}) for EGFR that is less than 1×10⁻⁸ M, 5×10⁻⁹ M, 1×10⁻⁹M, 5×10⁻¹⁰ M, 1×10⁻¹⁰ M, 5×10⁻¹¹ M, 1×10⁻¹¹ M or less under conditions that include one or both of acidic pH 6.0 to 6.5, inclusive, and 15 mM to 20 mM lactate, inclusive; and/or a K_{d} for EGFR that is greater than 1×10⁻⁸ M, 1×10⁻⁷ M, 1×10⁻⁶M, or greater under conditions that include one or both of or about pH 7.4 and 1 mM lactate, inclusive.

[0224] In any of the examples herein, the binding affinity of the modified anti-EGFR antibodies or antigen-binding fragments provided herein is measured in terms of half-maximal effective concentration (EC₅₀). In such examples, the modified anti-EGFR antibody, or antigen-binding fragment thereof, exhibits binding activity with an EC₅₀ for binding EGFR, or a soluble fragment thereof, that is less than 10 mM, 5 mM, 4 mM, 3 mM, 2 mM, 1 mM or less under conditions that include one or both of acidic pH (pH 6.0 to 6.5, inclusive) and/or 15 mM to 20 mM lactate, inclusive; and/or an EC₅₀ for binding EGFR, or a soluble fragment thereof, that is greater than 5 mM, 10 mM, 15 mM, 20 mM, 25 mM, 30 mM, 40 mM, 50 mM, 60 mM or greater.

[0225] In any of the examples herein, the binding activity of the modified anti-EGFR antibody, or antigen-binding fragment thereof, can be measured in the presence of a protein concentration that is at least 12 mg/mL, 15 mg/mL, 20 mg/mL, 25 mg/mL, 30 mg/mL, 35 mg/mL, 40 mg/mL, 45 mg/mL or 50 mg/mL, which for example, can be provided in serum, such as human serum, or as a serum albumin, such as human serum albumin.

[0226] In any of the examples herein, the protein is provided in serum and binding assays to test the binding activity of the modified anti-EGFR antibodies and fragments provided herein are performed in the presence of 20% (vol/vol) to 90% (vol/vol) serum, such as 20% (vol/vol) to 50% (vol/vol) or 20% (vol/vol) to 40% (vol/vol) serum. In particular examples, binding assays are performed in the presence of 25% (vol/vol) serum or about 25% (vol/vol) serum, such as human serum.

[0227] The variable heavy chain of the modified anti-EGFR antibodies or antigen binding fragments thereof can contain one or more amino acid replacements compared to the amino acid sequence of an unmodified anti-EGFR antibody, including 1 to 50 amino acid replacements, such as 1 to 40, 1 to 30, 1 to 20, 1 to 10 or 1 to 5 amino acid replacements compared to the unmodified variable heavy chain, such as the unmodified variable heavy chain set forth in SEQ ID NO: 2 or 7.

[0228] Any of the anti-EGFR antibodies or EGFR-binding fragments provided herein can be isolated or purified after production.

[0229] Provided herein are conjugates containing any of the anti-EGFR antibodies, or antigen-binding fragments thereof, provided herein, linked directly or indirectly to a targeted agent. Such conjugates contain the anti-EGFR antibody or antigen-binding fragment thereof that binds to EGFR (Ab), one or more targeted agent, and an optional a linker (L) for linking the Ab to the targeted agent. In some examples, there are 1 to 8 targeted agents conjugated to the antibody by 0 to 8 linkers.

[0230] The targeted agent of the conjugate can be a protein, peptide, nucleic acid or small molecule. In particular examples, the targeted agent is a therapeutic moiety, such as a cytotoxic moiety, a radioisotope, a chemotherapeutic agent, a lytic peptide or a cytokine. Exemplary therapeutic moieties which can be conjugated to any of the modified anti-EGFR antibodies, or fragments thereof, provided herein include, taxol; cytochalasin B; gramicidin D; ethidium bromide; emetine; mitomycin; etoposide; teniposide; vincristine; vinblastine; colchicine; doxorubicin; daunorubicin; dihydroxy anthracin dione; maytansine or an analog or derivative thereof; an auristatin or a functional peptide analog or derivative thereof; dolastatin 10 or 15 or an analog thereof; irinotecan or an analog thereof; mitoxantrone; mithramycin; actinomycin D; 1-dehydrotestosterone; a glucocorticoid; procaine; tetracaine; lidocaine; propranolol; puromycin; calicheamicin or an analog or derivative thereof; an antimetabolite; an alkylating agent; a platinum derivative; duocarmycin A, duocarmycin SA, rachelmycin (CC-1065), or an analog or derivative thereof; an antibiotic; a pyrrolo[2,1-c][1, 4]-benzodiazepine (PBD); a toxin; ribonuclease (RNase); DNase I, Staphylococcal enterotoxin A; and pokeweed antiviral protein.

[0231] In particular examples, the therapeutic moiety is a maytansine derivative that is a maytansinoid, such as ansamitocin or mertansine (DM1); an auristatin or a functional peptide analog or derivative thereof, such as monomethyl auristatin E (MMAE) or F (MMAF); an antimetabolite, such as methotrexate, 6-mercaptopurine, 6-thioguanine, cytarabine, fludarabine, 5-fluorouracil, decarbazine, hydroxyurea, asparaginase, gemcitabine, or cladribine; alkylating agent, such as mechlorethamine, thiotepa, chlorambucil, melphalan, carmustine (BCNU), lomustine (CCNU), cyclophosphamide, busulfan, dibromomannitol, streptozotocin, dacarbazine (DTIC), procarbazine and mitomycin C; a platinum derivative, such as cisplatin or carboplatin; an antibiotic, such as dactinomycin, bleomycin, daunorubicin, doxorubicin, idarubicin, mithramycin, mitomycin, mitoxantrone, plicamycin and anthramycin (AMC); a toxin, such as a diphtheria toxin and active fragments thereof and hybrid molecules, a ricin toxin, cholera toxin, a Shiga-like toxin, LT toxin, C3 toxin, Shiga toxin, pertussis toxin, tetanus toxin, soybean Bowman-Birk protease inhibitor, Pseudomonas exotoxin, alorin, saporin, modeccin, gelanin, abrin A chain, modeccin A chain, alpha-sarcin, Aleurites fordii proteins, dianthin proteins, Phytolacca americana proteins, momordica charantia inhibitor, curcin, crotin, gelonin, mitogillin, restrictocin, phenomycin, and enomycin toxins; or a pyrrolobenzodiazepine (PBD). PBD conjugates can include naturally occurring or synthetic PBDs. Naturally occurring PBDs include abbeymycin, anthramycin, chicamycin, DC-81, mazethramycin, neothramycins A and B, porothramycin, prothracarcin, sibanomicin (DC-102), sibiromycin, and tomamycin. Exemplary conjugates also include PBD dimers, including dimers containing a bridge that links the monomer PBD units of the dimer. The PBD dimer can be a homodimer or a heterodimer

[0232] In some examples, the antibody and targeted agent of the conjugate are linked directly. In other examples, the antibody and targeted agent of the conjugate are joined via a linker. The linker can be a peptide, a polypeptide or a chemical linker, which can be cleavable or non-cleavable. The linker can be conjugated to the antibody by several means. For example, the linker can be conjugated to one or more free thiols on the antibody, or to one or more primary amines on the antibody.

[0233] Also provided herein are nucleic acid molecule(s) that encode, such as the heavy chain of any of the anti-EGFR antibody, or antigen-binding fragment thereof, provided herein.

[0234] Provided are vectors that contain nucleic acid molecules that encode any of the anti-EGFR antibodies, EGFR-binding fragments, or heavy chains provided herein and cells, such as prokaryotic or eukaryotic cells that contain the vectors provided herein that contain nucleic acid molecules that encode any of the anti-EGFR antibodies, EGFR-binding fragments, or heavy chains provided herein.

[0235] Methods are also provided herein for making a modified anti-EGFR antibody, or antigen-binding fragment thereof, provided herein by expressing the heavy chain or light chain encoded from a vector or vectors provided herein encoding the heavy chain and the light chain in a suitable host cell and recovering the antibody.

[0236] Provided herein are combinations that include a modified anti-EGFR antibody or antigen-binding fragment provided herein, or a conjugate provided herein, and a chemotherapeutic agent or anti-cancer agent. The agent can be selected from among alkylating agents, nitrosoureas, topoisomerase inhibitors, and antibodies. In some examples, the chemotherapeutic agent is irinotecan, oxaliplatin, 5-fluorouracil (5-FU), Xeloda, Camptosar, Eloxatin, Adriamycin, paclitaxel, docetaxel, Cisplatin, gemcitabine or carboplatin. In some examples, a chemotherapeutic agent is an additional anti-EGFR antibody or antigen-binding fragment thereof that differs from the first antibody. In some examples, the additional anti-EGFR antibody is selected from among cetuximab, panitumumab, nimotuzumab, and antigen-binding fragments thereof or variants thereof

[0237] Provided herein are kits that include a modified anti-EGFR antibody or antigen-binding fragment provided herein, or a combination provided herein, in one or more containers, and instructions for use.

[0238] Provided herein are pharmaceutical compositions that include any of the modified anti-EGFR antibodies, antigen-binding fragments, or conjugates provided herein and a pharmaceutically acceptable carrier or excipient. A pharmaceutical composition provided herein can be formulated as a gel, ointment, liquid, suspension, aerosol, tablet, pill, powder or lyophile, and/or can be formulated for systemic, parenteral, topical, oral, mucosal, intranasal, subcutaneous, aerosolized, intravenous, bronchial, pulmonary, vaginal, vulvovaginal, esophageal, or oroesophageal administration. A pharmaceutical composition provided herein can be formulated for single dosage administration or for multiple dosage administration. In some examples, a pharmaceutical composition provided herein is a sustained release formulation.

[0239] Provided herein are methods of treating a condition responsive to treatment with an anti-EGFR antibody in a subject, including administering to the subject a pharmaceutically effective amount of a pharmaceutical composition provided herein. Examples of conditions that are responsive to treatment with an anti-EGFR antibody include a tumor, such as a solid tumor, cancer or metastasis, particularly when the tumor expresses EGFR.

[0240] In some examples, the condition responsive to treatment with an anti-EGFR antibody is head and neck cancer, non-small cell lung cancer or colorectal cancer. In some examples, a subject to be treated has a tumor that does not have a marker, such as KRAS, NRAS or BRAF, that confers resistance to anti-EGFR therapy. Thus in some examples, a subject can have a KRAS mutation-negative epidermal growth factor receptor (EGFR)-expressing colorectal cancer.

[0241] The subject for treatment can be a mammal, such as a human. The subject can be treated by topical, parenteral, local, or systemic administration of a pharmaceutical composition provided herein. For example, the pharmaceutical composition can be administered intranasally, intramuscularly, intradermally, intraperitoneally, intravenously, subcutaneously, orally, or by pulmonary administration.

[0242] The methods of treating a condition responsive to treatment with an anti-EGFR antibody in a subject provided herein can also include administration of one or more anticancer agents or treatments, such as irinotecan, oxaliplatin, 5-fluorouracil (5-FU), Xeloda, Camptosar, Eloxatin, Adriamycin, paclitaxel, docetaxel, Cisplatin, gemcitabine, carboplatin and radiation, or include administration of one or more additional anti-EGFR antibodies or antigen-binding fragments thereof, such as cetuximab, panitumumab, nimotuzumab, and antigen-binding fragments thereof.

[0243] In such methods, the pharmaceutical composition and the anticancer agent can be formulated as a single composition or as separate compositions, and the pharmaceutical composition and the anticancer agent can be administered sequentially, simultaneously or intermittently.

[0244] In the methods provided herein, the antibody can be administered at a dosage of about or 0.1 mg/kg to about or 100 mg/kg, such as, for example, about or 0.5 mg/kg to about or 50 mg/kg, about or 5 mg/kg to about or 50 mg/kg, about or 1 mg/kg to about or 20 mg/kg, about or 1 mg/kg to about or 100 mg/kg, about or 10 mg/kg to about or 80 mg/kg, or about or 50 mg/kg to about or 100 mg/kg or more; or at a dosage of about or 0.01 mg/m² to about or 800 mg/m² or more, such as for example, about or 0.01 mg/m², about or 0.1 mg/m², about or 0.5 mg/m², about or 1 mg/m², about or 5 mg/m², about or 10 mg/m², about or 15 mg/m², about or 20 mg/m², about or 25 mg/m², about or 30 mg/m², about or 35 mg/m², about or 40 mg/m², about or 45 mg/m², about or 50 mg/m², about or 100 mg/m², about or 150 mg/m², about or 200 mg/m², about or 250 mg/m², about or 300 mg/m², about or 400 mg/m², about or 500 mg/m², about or 600 mg/m² about or 700 mg/m².

[0245] Also provided herein are pharmaceutical compositions that can be formulated as a medicament for treating a condition responsive to treatment with an anti-EGFR antibody in a subject, and uses of pharmaceutical compositions for treating a condition responsive to treatment with an anti-EGFR antibody in a subject. Such pharmaceutical compositions or uses can be applied to a tumor, such as a tumor that is a solid tumor and/or expresses EGFR, cancer or metastasis. In particular examples, the condition to be treated by the pharmaceutical composition or use provided herein is head and neck cancer, non-small cell lung cancer or colorectal cancer.

### BRIEF DESCRIPTION OF THE FIGURES

[0246] FIG. 1 (A-B) depicts alignments of exemplary heavy and light chains of cetuximab in the art. For example, FIG. 1A depicts alignment of: the heavy chain amino acid sequence set forth in SEQ ID NO: 5, which contains a heavy chain variable domain (V_{H}) set forth in SEQ ID NO: 2 and the heavy chain constant domain (C_{H}) set forth in SEQ ID NO: 21; the heavy chain sequence set forth in SEQ ID NO: 6, which contains a V_{H} set forth in SEQ ID NO: 7 and a C_{H} set forth in SEQ ID NO: 22; the heavy chain sequence set forth in SEQ ID NO: 12, which contain the V_{H} set forth in SEQ ID NO: 2 and the C_{H} set forth in SEQ ID NO: 23; and the heavy chain sequence set forth in SEQ ID NO: 1, which contains the V_{H} set forth in SEQ ID NO: 2 and the C_{H} set forth in SEQ ID NO: 20. The heavy chain variable domain (V_{H}), three complementarity determining regions (CDRs) of the heavy chain (V_{H} CDR 1, V_{H} CDR 2, and V_{H} CDR 3), the three subdomains of the heavy chain constant domain (C_{H}1, C_{H}2, and C_{H}3) and the hinge region residues are indicated by arrows labeled with each of the regions or domains. FIG. 1B depicts the alignment of: the light chain sequence set forth in SEQ ID NO: 3, which contains the light chain variable domain (V_{L}) set forth in SEQ ID NO: 4 and the light chain constant domain (C_{L}) set forth in SEQ ID NO: 33; the light chain sequence set forth in SEQ ID NO: 10, which contains the V_{L} set forth in SEQ ID NO: 11 and the C_{L} set forth in SEQ ID NO: 33; the light chain sequence set forth in SEQ ID NO: 13, which contains the V_{L} set forth in SEQ ID NO: 4 and the C_{L} set forth in SEQ ID NO: 34; and the light chain sequence set forth in SEQ ID NO: 8, which c ntains the V_{L} set forth in SEQ ID NO: 9 and the C_{L} set forth in SEQ ID NO: 34. The light chain variable domain (V_{L}), three complementarity determining regions (CDRs) of the light chain (V_{L} CDR 1, V_{L} CDR 2, and V_{L} CDR 3), and the light chain constant domain (C_{L}) are indicated by arrows labeled with each of the regions or domains. In the depicted alignments, a “*” means that the aligned residues are identical, a “:” means that aligned residues are not identical, but are similar and contain conservative amino acids residues at the aligned position, and a “.” means that the aligned residues are similar and contain semi-conservative amino acid residues at the aligned position. The exemplary, non-limiting, position for amino acid replacements corresponding to position 104 is indicated by highlighting.

[0247] FIG. 2 (A-D) depicts alignments to identify corresponding residues between and among aligned antibodies. For example, FIG. 2A depicts the alignment of the heavy chain variable domains set forth in SEQ ID NO: 2 and 7 with the heavy chain variable domain of an exemplary unmodified anti-EGFR antibody designated H225 set forth in SEQ ID NO: 14. FIG. 2B depicts the alignment of the heavy chain variable domains set forth in SEQ ID NO: 2 and 7 with the heavy chain variable domain of an exemplary unmodified anti-EGFR antibody designated Hu225 set forth in SEQ ID NO: 16. The three subdomains of the heavy chain constant domain (C_{H}1, C_{H}2, and C_{H}3) are indicated by arrows labeled with each of the domains. FIG. 2C depicts the alignment of the light chain variable domains set forth in SEQ ID NO: 4, 9 and 11 with the light chain variable domain of an exemplary unmodified anti-EGFR antibody designated H225 set forth in SEQ ID NO: 15. FIG. 2D depicts the alignment of the light chain variable domains set forth in SEQ ID NO: 4, 9 and 11, to with the light chain variable domain of the exemplary unmodified anti-EGFR antibody designated Hu225 set forth in SEQ ID NO: 17. The three complementarity determining regions (CDRs) of the light chain (V_{L} CDR 1, V_{L} CDR 2, and V_{L} CDR 3) are indicated by arrows labeled with each of the domains. In the depicted alignments, a “*” means that the aligned residues are identical, a “:” means that aligned residues are not identical, but are similar and contain conservative amino acids residues at the aligned position, and a “.” means that the aligned residues are similar and contain semi-conservative amino acid residues at the aligned position. Exemplary, non-limiting, corresponding positions for amino acid replacements are indicated by highlighting.

### DETAILED DESCRIPTION

### Outline

[0248] A. DEFINITIONS
[0249] B. EGFR AND ANTI-EGFR ANTIBODIES
   [0250] 1. EGFR
   [0251] 2. Anti-EGFR antibodies and side effects
   [0252] 3. Cetuximab (Erbitux) and derivatives thereof
      [0253] a. Structure
      [0254] b. Function
[0255] C. MODIFIED ACTIVE ANTI-EGFR ANTIBODIES WITH ACIDIC pH SELECTIVITY
   [0256] 1. Anti-EGFR antibodies containing 104E modification
      [0257] a. Additional Modifications
         [0258] i. Additional heavy chain modifications
         [0259] ii. Additional light chain modifications
         [0260] iii. Other modifications
      [0261] b. Exemplary 104E modified anti-EGFR antibodies and fragments thereof
   [0262] 2. Humanized anti-EGFR antibodies
   [0263] 3. Anti-EGFR antibodies containing 104D modification
   [0264] 4. Conjugates
      [0265] a. Targeted Agents
         [0266] i. Maytansinoid drug moieties
         [0267] ii. Auristatins and dolastatins drug moieties
         [0268] iii. Pyrrolobenzodiazepines (PBDs)
         [0269] iv. Cell toxin moieties
         [0270] v. Nucleic acids for targeted delivery
      [0271] b. Linkers
         [0272] i. Peptide linkers
         [0273] ii. Chemical linkers
      [0274] c. Exemplary Conjugates
         [0275] i. Anti-EGFR Antibody-Auristatin Conjugates
         [0276] ii. Anti-EGFR Antibody-Maytansinoid Conjugates
[0277] D. METHODS OF PRODUCING ANTI-EGFR ANTIBODIES
   [0278] 1. Generating and producing anti-EGFR antibodies
      [0279] a. Vectors
      [0280] b. Cells and expression systems
         [0281] i. Prokaryotic expression
         [0282] ii. Yeast
         [0283] iii. Insects
         [0284] iv. Mammalian cells
         [0285] v. Plants
   [0286] 2. Purification
[0287] E. METHODS FOR IDENTIFYING AND ASSESSING ANTI-EGFR ANTIBODY PROPERTIES AND ACTIVITIES
   [0288] 1. Binding assays
   [0289] 2. Cell based assays
   [0290] 3. Animal models
   [0291] 4. Pharmacokinetics and pharmacodynamics assays
[0292] F. PHARMACEUTICAL COMPOSITIONS, FORMULATIONS, KITS, ARTICLES OF MANUFACTURE AND COMBINATIONS
   [0293] 1. Pharmaceutical compositions and formulations
   [0294] 2. Articles of manufacture/kits
   [0295] 3. Combinations
[0296] G. THERAPEUTIC USES
[0297] 1. Exemplary diseases and conditions
   [0298] a. Cancer
   [0299] b. Non-cancer hyperproliferative diseases
   [0300] c. Autoimmune diseases or disorders
   [0301] d. Inflammatory disorders
   [0302] e. Infectious diseases
   [0303] f. Other diseases and conditions
   [0304] 2. Subjects for therapy
      [0305] a. Selection of subjects overexpressing EGFR
      [0306] b. Selection of subjects exhibiting EGFR-associated polymorphism
      [0307] c. Identifying subjects exhibiting Anti-EGFR-associated side effects
         [0308] i. Skin toxicities
         [0309] ii. Hypomagnesemia
      [0310] d. Other methods of selecting or identifying subjects for treatment
   [0311] 3. Dosages
   [0312] 4. Routes of administration
   [0313] 5. Combination therapies
[0314] H. EXAMPLES

### A. DEFINITIONS

[0315] Unless defined otherwise, all technical and scientific terms used herein have the same meaning as is commonly understood by one of skill in the art to which the invention(s) belong. All patents, patent applications, published applications and publications, GenBank sequences, databases, websites and other published materials referred to throughout the entire disclosure herein, unless noted otherwise, are incorporated by reference in their entirety. In the event that there are a plurality of definitions for terms herein, those in this section prevail. Where reference is made to a URL or other such identifier or address, it is understood that such identifiers can change and particular information on the internet can come and go, but equivalent information can be found by searching the internet. Reference thereto evidences the availability and public dissemination of such information.

[0316] As used herein, a conditionally active protein (e.g., antibody) is more active in one environment, particularly one in vivo environment, compared to a second environment. Hence, a conditionally active protein exhibits selective activity (e.g., binding activity) in one environment compared to another environment. For purposes herein, a conditionally active protein exhibits pH-selective activity, and is more active, under conditions that include one or both of pH 6.0 to 6.5, inclusive, and/or 10 mM to 20 mM lactate, inclusive, such as exists in a tumor environment, than under conditions that include one or both of pH of 7.0 to 7.4, inclusive, and/or 0.5 mM to 5 mM lactate (e.g., 1 mM), inclusive such as exists in a non-tumor environment, such as in the skin, GI tract or other non-tumor environment. Therefore, a conditionally active protein provided herein is a protein that exhibits selective activity, and is more active, in a tumor microenvironment than in a non-tumor microenvironment, such as the skin, GI tract or other non-tumor environment. Conditional activity can be manifested in vivo or in vitro. For example, conditional activity exists in vivo if the activity (e.g., binding activity) in a tumor environment is greater than a non-tumor environment, for example the ratio of activity in the tumor environment compared to the non-tumor microenvironment is at least 1.1, 1.2, 1.3, 1.4, 1.5, 1.6, 1.7, 1.8, 1.9, 2.0, 2.5, 3.0, 3.5, 4.0, 4.5, 5.0, 6.0, 7.0, 8.0, 9.0, 10.0, 11.0, 12.0, 13.0, 14.0, 15.0, 16.0, 17.0, 18.0, 19.0, 20.0, 25.0, 30.0, 35.0, 40.0, 45.0, 50.0 or more.

[0317] As used herein, a therapeutic agent that has “conditional activity in a tumor microenvironment,” or is “conditionally active in a tumor microenvironment,” or variations thereof, is a therapeutic agent, such as a modified anti-EGFR antibody provided herein, that is more active as a therapeutic in a tumor microenvironment than in a non-tumor microenvironment (e.g., a healthy or non-diseased tissue or cell, such as the basal layer of the skin).

[0318] As used herein, “pH-selective activity” refers to a protein (e.g., an antibody) that is more active under conditions that include, or in the presence of, acidic pH (e.g., pH 6.0 to 6.5, and optionally elevated lactate levels, e.g., 10 mM to 20 mM) than in an environment of neutral pH (e.g., pH 7.0 to 7.4, and optionally normal lactate concentrations, e.g., 0.5 mM to 5 mM). pH-selective activity can be manifested in vivo or in vitro. pH-selective activity exists if the activity (e.g., binding activity) is greater under acidic conditions (e.g., pH 6.0 to 6.5 and/or 10 mM to 20 mM lactate) than under neutral conditions (e.g., pH 7.0 to 7.4 and/or 0.5 mM to 5 mM lactate). For example, pH-selective activity exists if the ratio of activity under acidic conditions to neutral conditions is at least 1.1, 1.2, 1.3, 1.4, 1.5, 1.6, 1.7, 1.8, 1.9, 2.0, 2.5, 3.0, 3.5, 4.0, 4.5, 5.0, 6.0, 7.0, 8.0, 9.0, 10.0, 11.0, 12.0, 13.0, 14.0, 15.0, 16.0, 17.0, 18.0, 19.0, 20.0, 25.0, 30.0, 35.0, 40.0, 45.0, 50.0 or more.

[0319] As used herein, “conditions that simulate” a diseased or non-diseased microenvironment, refer to in vitro or in vivo assay conditions that correspond to a condition or conditions that exist in the environment in vivo. For example, if a microenvironment is characterized by low or acidic pH, then conditions that simulate the microenvironment include buffer or assay conditions have a low or acidic pH.

[0320] As used herein, conditions that exist in a tumor microenvironment include conditions that exist therein compared to a non-tumor microenvironment (e.g., a healthy or non-diseased cell or tissue). Conditions that exist in a tumor microenvironment include increased vascularization, hypoxia, low pH, increased lactate concentration, increased pyruvate concentration, increased interstitial fluid pressure and altered metabolites or metabolism indicative of a tumor. For example, a condition that exists in a tumor microenvironment is low pH, i.e., pH less than 7.4, typically between or about between 5.6 to 6.8, such as less than or about or pH 5.6, 5.7, 5.8, 5.9, 6.0, 6.1, 6.2, 6.3, 6.4, 6.5, 6.6, 6.7, or 6.8. A condition that exists in a tumor microenvironment also can include a high lactate concentration at or about between 5 mM to 20 mM lactic acid, for example 10 mM to 20 mM lactic acid such as 15 mM to 18 mM, and in particular at least or at least about or 16 mM, 16.5 mM, 16.7 mM or 17 mM lactic acid.

[0321] As used herein, conditions that exist in a non-tumor microenvironment include a condition or conditions that are not present in a tumor microenvironment. For purposes herein, the conditions or condition is the corresponding property or characteristic that is present in a tumor microenvironment and non-tumor environment, such as pH, lactate concentration or pyruvate concentration, but that differs between the two microenvironments. A condition that exists in a non-tumor microenvironment (e.g., basal layer of the skin) is a pH from about 7.0 to about 7.8, such as at least or about or pH 7.1, 7.2, 7.3, 7.4, 7.5, 7.6, 7.7 or 7.8. For example, the pH is a neutral pH of between or about between 7.0 to 7.4, such as or about pH 7.4. A condition that exists in a non-tumor microenvironment (e.g., basal layer of the skin) also includes a lactate concentration that is 0.5 to 5 mM lactate, such as, for example 0.5 mM to 4 mM lactic acid, for example about or 0.5, 1, 2, 3, 4, or 5 mM lactic acid.

[0322] As used herein, “low pH” or “acidic pH”, which are used interchangeably herein, refers to a pH ranging from about 5.6 to about 6.8, such as less than or about or pH 5.6, 5.7, 5.8, 5.9, 6.0, 6.1, 6.2, 6.3, 6.4, 6.5, 6.6, 6.7, or 6.8. For example, a low pH or acidic pH is between 6.0 to 6.5, inclusive, such as or about pH 6.0 or pH 6.5.

[0323] As used herein, epidermal growth factor receptor (EGFR; Uniprot Accession No. P00533 and set forth in SEQ ID NO: 43) refers to a tyrosine kinase growth factor receptor that is a member of the ErbB family of receptor tyrosine kinases and that is bound and activated by ligands such as epidermal growth factor (EGF), as well as other endogenous EGF-like ligands including TGF-α, amphiregulin, heparin-binding EGF (HB-EGF) and betacellulin. Upon activation, EGFR is involved in signaling cascades important for cell growth, proliferation, survival and motility. In addition to their presence on a tumor cells, epidermal growth factor receptors are ubiquitous, distributed randomly on the surface of normal cells, excluding hematopoietic cells and cells of epidermal origin. For example, EGFR is expressed on skin keratinocytes.

[0324] As used herein, ratio of activity with reference to binding activity of a modified anti-EGFR antibody or antigen-binding fragment thereof refers to the relation of binding activity to EGFR antigen (e.g., human EGFR or soluble fragment thereof) under a first set of conditions that include one or both of pH 6.0 to 6.5, inclusive, and lactate concentration between 15 mM to 20 mM, inclusive, compared to under a second set of conditions that include one or both of pH about or 7.4 and lactate concentration of about or 1 mM. It is expressed by the quotient of the division of the activity at the first condition by the activity at the second condition, as long as the activity positively correlates with the binding activity. In some instances herein, binding activity is provided as a measure that negatively correlates with binding activity (e.g., EC50 or KD). In such examples, the ration of activity is expressed first as the inverse of the binding activity under both set of conditions, and then as the quotient of the division of the inverse of the activity at the first condition by the activity at the second condition. It is understood that in determining binding activity and the ratio of binding activity, the binding activity under the first and second condition is measured under the same assay conditions, except for the difference in pH and/or lactic acid concentration. A ratio of binding activity of >1 indicates that binding activity is greater or higher under the first set of conditions than under the second set of conditions.

[0325] As used herein, anti-EGFR antibody refers to any antibody that specifically binds to epidermal growth factor receptor (EGFR) or a soluble fragment thereof and blocks the binding of ligands to EGFR, thereby resulting in competitive inhibition of EGFR and inhibition of EGFR activation. Hence, anti-EGFR antibodies are EGFR inhibitors. Reference to anti-EGFR antibodies herein include a full-length antibody and antigen-binding fragments thereof that specifically bind to EGFR.

[0326] As used herein, an epidermal growth factor receptor (EGFR) antigen refers to a tyrosine growth factor receptor that is bound by ligands such as epidermal growth factor (EGF). EGFR includes human and non-human proteins. In particular, EGFR antigen includes human EGFR, which is a 170 kDa Type I glycoprotein that has the sequence of amino acids set forth in SEQ ID NO: 43 (see e.g., Uniprot Accession No. P00533).

[0327] As used herein, a soluble EGFR refers to soluble EGFR isoforms (sEGFR) that lack the transmembrane or intracellular domain. Hence, a soluble EGFR includes proteins that include only the extracellular domain (ECD) portion of EGFR. An exemplary soluble EGFR contains only the ECD of EGFR set forth in SEQ ID NO: 43 or a portion thereof sufficient to bind EGF, corresponding to amino acid residues 25-645 of SEQ ID NO: 43 or a portion thereof sufficient to bind EGF. A soluble EGFR also can include proteins that are linked, directly or indirectly, to other domains or regions of other proteins.

[0328] As used herein, cetuximab (225, also known and marketed as Erbitux) refers to an anti-EGFR antibody that is a chimeric (mouse/human) monoclonal antibody that specifically binds EGFR and is an EGFR inhibitor. Cetuximab is reported to be composed of 4 polypeptide chains, including 2 identical heavy chains of 449 amino acids each (e.g., set forth in SEQ ID NO: 12), and 2 identical light chains of 214 amino acids each (e.g., set forth in SEQ ID NO: 13) (see IMGT Acc. No. 7906). The variable regions corresponding to the variable regions of M225 are set forth as amino acid residues 1-119 of SEQ ID NO: 12 (variable heavy chain, set forth in SEQ ID NO: 2) and as amino acid residues 1-107 of SEQ ID NO: 13 (variable light chain, set forth as SEQ ID NO: 4). C225 contains a human IgG1 heavy chain constant region set forth as amino acid residues 120-449 of SEQ ID NO: 12 (set forth in SEQ ID NO: 23) containing human constant domains C_{H}1-C_{H}2-hinge-C_{H}3, including C_{H}1 (amino acid residues 120-217 of SEQ ID NO: 12), a hinge region (amino acid residues 218-232 of SEQ ID NO: 12), C_{H}2 (amino acid residues 233-342 of SEQ ID NO: 12) and C_{H}3 (amino acid residues 343-449 of SEQ ID NO: 12). C225 also contains a human Cκ light chain constant region set forth as amino acid residues 108-213 of SEQ ID NO: 13 (set forth as SEQ ID NO: 34). Reference to cetuximab herein also refers to antibodies reported in the literature that that differ by only a few amino acids (see, e.g., U.S. Pat. No. 7,060,808; published U.S. Patent Appl. No. US 20110117110; U.S. Patent Publ. No. US 20130266579; International Published PCT Appl. No. WO2004085474; GenBank Accession No. CAH61633; DrugBank Acc. No. DB00002; IMGT Acc. No. 7906). Thus, reference to cetuximab herein also includes the sequence of amino acids set forth in SEQ ID NOS: 1 (heavy chain) and 3 (light chain); SEQ ID NOS: 5 (heavy chain) and 3 (light chain); SEQ ID NOS: 6 (heavy chain) and 8 (light chain); or SEQ ID NOS: 6 (heavy chain) and 10 (light chain). The cetuximab sequences and corresponding SEQ ID NOS are provided in FIGS. 1A and 1B and in Table 5.

[0329] Reference to cetuximab herein, when so indicated, also includes humanized or other variant derivatives of cetuximab that contain complementarity determining regions (CDRs) identical to cetuximab. The CDRs of cetuximab include, V_{H} CDR 1 (amino acid residues to 31-35, according to Kabat definition, of SEQ ID NO: 2 or 7, set forth in SEQ ID NO: 35); V_{H} CDR 2 (amino acid residues 50-65 of SEQ ID NO: 2 or 7, set forth in SEQ ID NO: 36); V_{H} CDR 3 (amino acid residues 98-108 of SEQ ID NO: 2 or 7, set forth in SEQ ID NO: 37); V_{L} CDR 1 (amino acid residues 24-34 of SEQ ID NO: 4, 9 or 11, set forth in SEQ ID NO: 38); V_{L} CDR 2 (amino acid residues 50-56 of SEQ ID NO: 4, 9 or 11, set forth in SEQ ID NO: 39); and V_{L} CDR 3 (amino acid residues 89-97 of SEQ ID NO: 4, 9 or 11, set forth in SEQ ID NO: 40), see, e.g., U.S. Publ. No. US 20110117110.

[0330] As used herein, an antigen-binding fragment of cetuximab refers to an antibody derived from cetuximab but that is less than the full length of cetuximab but contains at least a portion of the variable region of the antibody sufficient to form an antigen binding site (e.g., one or more CDRs) and thus retains the binding specificity and/or activity of cetuximab. The variable region of the cetuximab heavy chain is set forth in SEQ ID NO: 2 or 7, which corresponds to amino acids 1-119 of SEQ ID NO: 1, 5, 6, or 12. The variable region of the cetuximab light chain is set forth in SEQ ID NO: 4, 9, or 11, which corresponds to amino acids 1-107 of SEQ ID NO: 3, 8, 10 or 13 (see FIG. 1A or 1B and Table 5). Thus, exemplary antigen-binding fragments of cetuximab include antibodies that contain the sequence of amino acids set forth in SEQ ID NO: 2 (variable heavy chain) and the sequence of amino acids set forth in SEQ ID NO: 4 (variable light chain), antibodies that contain the sequence of amino acids set forth in SEQ ID NO: 7 (variable heavy chain) and the sequence of amino acids set forth in SEQ ID NO: 9 (variable light chain), antibodies that contain the sequence of amino acids set forth in SEQ ID NO: 7 (variable heavy chain) and the sequence of amino acids set forth in SEQ ID NO: 11 (variable light chain) or a portion of the variable heavy or light chain sufficient to bind to antigen. For example, an exemplary antigen-binding fragment of cetuximab is a Fab antibody that contains the sequence of amino acids set forth in SEQ ID NO: 2 or 7 and that includes a CH1 region of an IgG1 antibody set forth in any of SEQ ID NOS: 23 or CH1 region of other reported IgG1 set forth in any of SEQ ID NOS: 19-22 (VH-CH1) and SEQ ID NO: 3 (light chain VH-CL).

[0331] As used herein, an “unmodified antibody” refers to a starting polypeptide heavy and light chain or fragment thereof that is selected for modification as provided herein. The starting target polypeptide can be a wild-type or reference form of an antibody, which is a predominant reference polypeptide to which activity is assessed. For example, cetuximab is a predominant or reference polypeptide for modification herein. The unmodified or starting target antibody can be altered or mutated, such that it differs from a predominant or reference form of the antibody, but is nonetheless referred to herein as a starting unmodified target protein relative to the subsequently modified polypeptides produced herein (e.g., antigen-binding fragments or variants of cetuximab). Thus, existing proteins known in the art that have been modified to have a desired increase or decrease in a particular activity or property compared to an unmodified reference protein can be selected and used as the starting unmodified target protein.

[0332] For example, a protein that has been modified from a predominant or reference form by one or more single amino acid changes and possesses either an increase or decrease in a desired property, such as reduced immunogenicity, can be a target protein, referred to herein as unmodified, for further modification of either the same or a different property. Exemplary reference or unmodified anti-EGFR antibodies are full length anti-EGFR antibody polypeptides set forth in SEQ ID NOS: 1 (Heavy Chain) and 3 (Light Chain), SEQ ID NOS: 5 (Heavy Chain) and 3 (Light Chain), SEQ ID NOS: 12 (Heavy Chain) and 13 (Light Chain), or SEQ ID NOS: 6 (Heavy Chain) and 8 (Light Chain), SEQ ID NOS: 6 (Heavy Chain) and 10 (Light Chain); or antigen-binding fragments thereof. Exemplary antigen-binding fragments include anti-EGFR antibody fragments that contain the polypeptide set forth in SEQ ID NOS: 2 (variable Heavy Chain) and 4 (variable light chain), SEQ ID NOS: 7 (variable Heavy Chain) and 9 (variable light chain), or SEQ ID NO: 7 (variable heavy chain) and SEQ ID NO: 11 (variable light chain). An unmodified or reference antibody also includes antibody variants thereof that exhibit heavy or light chains or portions thereof that exhibit at least 68%, 69%, 70%, 75%, 80%, 85%, 86%, 87%, 88%, 89%, 90%, 91%, 92%, 93%, 94%, 95%, 96%, 97%, 98%, or 99% sequence identity thereto to any of the recited SEQ ID NOS, whereby the resulting antibody specifically binds EGFR.

[0333] As used herein, “modified anti-EGFR antibody” or “variant anti-EGFR antibody” refers to an anti-EGFR antibody that contains at least one amino acid addition, deletion or replacement as described herein in its sequence of amino acids compared to a reference or unmodified anti-EGFR antibody. For purposes herein, the at least one amino acid replacement is replacement with glutamic acid (E) in the variable heavy chain at a position corresponding to position 104 with reference to SEQ ID NO: 2 or 7. A modified anti-EGFR antibody can contain additional modifications (e.g., amino acid replacements). For example, a modified anti-EGFR antibody can have up to 150 amino acid replacements, as long as the resulting modified anti-EGFR antibody exhibits binding to EGFR. Typically, a modified anti-EGFR antibody contains 1, 2, 3, 4, 5, 6, 7, 8, 9, 10, 11, 12, 13, 14, 15, 16, 17, 18, 19, 20, 21, 22, 23, 24, 25, 26, 27, 28, 29, 30, 31, 32, 33, 34, 35, 36, 37, 38, 39, 40, 41, 42, 43, 44, 45, 46, 47, 48, 49, or 50 amino acid replacements compared to an unmodified antibody. It is understood that a modified anti-EGFR antibody also can include any one or more other modifications, in addition to at least one amino acid addition, deletion or replacement as described herein.

[0334] As used herein, “both” with reference to modifications in a variable heavy chain, variable light chain or both means that an antibody contains one or more modifications in the variable heavy chain and one or more modifications in the variable light chain of the antibody.

[0335] As used herein, a “modification” is in reference to modification of a sequence of amino acids of a polypeptide or a sequence of nucleotides in a nucleic acid molecule and includes deletions, insertions, and replacements of amino acids or nucleotides, respectively. Methods of modifying a polypeptide are routine to those of skill in the art, such as by using recombinant DNA methodologies.

[0336] As used herein, “deletion,” when referring to a nucleic acid or polypeptide sequence, refers to the deletion of one or more nucleotides or amino acids compared to a sequence, such as a target polynucleotide or polypeptide or a native or wild-type sequence.

[0337] As used herein, “insertion” when referring to a nucleic acid or amino acid sequence, describes the inclusion of one or more additional nucleotides or amino acids, within a target, native, wild-type or other related sequence. Thus, a nucleic acid molecule that contains one or more insertions compared to a wild-type sequence, contains one or more additional nucleotides within the linear length of the sequence. As used herein, “additions,” to nucleic acid and amino acid sequences describe addition of nucleotides or amino acids onto either termini compared to another sequence.

[0338] As used herein, “substitution” or “replacement” refers to the replacing of one or more nucleotides or amino acids in a native, target, wild-type or other nucleic acid or polypeptide sequence with an alternative nucleotide or amino acid, without changing the length (as described in numbers of residues) of the molecule. Thus, one or more substitutions in a molecule does not change the number of amino acid residues or nucleotides of the molecule. Amino acid replacements compared to a particular polypeptide can be expressed in terms of the number of the amino acid residue along the length of the polypeptide sequence. For example, a modified polypeptide having a modification in the amino acid at the 104^{th} position of the amino acid sequence that is a substitution/replacement of Tyrosine (Tyr; T) with glutamic acid (Glu; E) can be expressed as Y104E, Tyr104Glu, or 104E. Simply Y104 can be used to indicate that the amino acid at the modified 104^{th} position is a tyrosine. For purposes herein, since modifications are in a heavy chain (HC) or light chain (LC) of an antibody, modifications also can be denoted by reference to HC- or LC- to indicate the chain of the polypeptide that is altered.

[0339] As used herein, “at a position corresponding to” or recitation that nucleotides or amino acid positions “correspond to” nucleotides or amino acid positions in a disclosed sequence, such as set forth in the Sequence Listing, refers to nucleotides or amino acid positions identified upon alignment with the disclosed sequence to maximize identity using a standard alignment algorithm, such as the GAP algorithm. For purposes herein, residues for modification provided herein are with reference to amino acid positions set forth in the variable heavy chain set forth in SEQ ID NO: 2 or 7 and the variable light chain set forth in SEQ ID NO: 4, 9 or 11. Hence, corresponding residues can be determined by alignment of a reference heavy chain sequence, or portion thereof, with the sequence set forth in SEQ ID NO: 2 or 7 (e.g., FIG. 2A or 2B) and/or by alignment of a reference light chain sequence, or portion thereof, with the sequence set forth in SEQ ID NO: 4, 9 or 11 (e.g., FIG. 2C or 2D). By aligning the sequences, one skilled in the art can identify corresponding residues, for example, using conserved and identical amino acid residues as guides. In general, to identify corresponding positions, the sequences of amino acids are aligned so that the highest order match is obtained (see, e.g., Computational Molecular Biology, Lesk, A. M., ed., Oxford University Press, New York, 1988; Biocomputing: Informatics and Genome Projects, Smith, D. W., ed., Academic Press, New York, 1993; Computer Analysis of Sequence Data, Part I, Griffin, A. M., and Griffin, H. G., eds., Humana Press, New Jersey, 1994; Sequence Analysis in Molecular Biology, von Heinje, G., Academic Press, 1987; and Sequence Analysis Primer, Gribskov, M. and Devereux, J., eds., M Stockton Press, New York, 1991; Carrillo et al. (1988) SIAM J Applied Math 48:1073). Exemplary alignments are provided in FIG. 2A-D and exemplary amino acid replacements based on corresponding aligned residues are set forth in Table 6 and Table 8.

[0340] As used herein, alignment of a sequence refers to the use of homology to align two or more sequences of nucleotides or amino acids. Typically, two or more sequences that are related by 50% or more identity are aligned. An aligned set of sequences refers to 2 or more sequences that are aligned at corresponding positions and can include aligning sequences derived from RNAs, such as ESTs and other cDNAs, aligned with genomic DNA sequence. Related or variant polypeptides or nucleic acid molecules can be aligned by any method known to those of skill in the art. Such methods typically maximize matches, and include methods, such as using manual alignments and by using the numerous alignment programs available (e.g., BLASTP) and others known to those of skill in the art. By aligning the sequences of polypeptides or nucleic acids, one skilled in the art can identify analogous portions or positions, using conserved and identical amino acid residues as guides. Further, one skilled in the art also can employ conserved amino acid or nucleotide residues as guides to find corresponding amino acid or nucleotide residues between and among human and non-human sequences. Corresponding positions also can be based on structural alignments, for example by using computer simulated alignments of protein structure. In other instances, corresponding regions can be identified. One skilled in the art also can employ conserved amino acid residues as guides to find corresponding amino acid residues between and among human and non-human sequences.

[0341] As used herein, recitation that proteins are “compared under the same conditions” means that different proteins are treated identically or substantially identically such that any one or more conditions that can influence the activity or properties of a protein or agent are not varied or not substantially varied between the test agents. For example, when the activity of a modified anti-EGFR antibody is compared to an unmodified anti-EGFR antibody any one or more conditions such as amount or concentration of the polypeptide; presence, including amount, of excipients, carriers or other components in a formulation other than the active agent (e.g., anti-EGFR antibody); temperature; pH; time of storage; storage vessel; properties of storage (e.g., agitation) and/or other conditions associated with exposure or use are identical or substantially identical between and among the compared polypeptides.

[0342] As used herein, an “adverse effect,” or “side effect” or “adverse event,” or “adverse side effect” refers to a harmful, deleterious and/or undesired effect associated with administering a therapeutic agent. For example, side effects associated with administration of an anti-EGFR antibody, such as cetuximab are known to one of skill in the art and described herein. Such side effects include, for example, dermatological or dermal toxicity such as rash. Side effects or adverse effects are graded on toxicity, and various toxicity scales exist providing definitions for each grade. Examples of such scales are toxicity scales of the National Cancer Institute Common Toxicity Criteria version 2.0, the World Health Organization or Common Terminology Criteria for Adverse Events (CTCAE) scale. Generally, the scale is as follows: Grade 1=mild side effects; Grade 2=moderate side effects; Grade 3=severe side effects; Grade 4=life threatening or disabling side-effects; Grade 5=fatal. Assigning grades of severity is within the skill of an experienced physician or other health care professional.

[0343] As used herein, a “property” of a polypeptide, such as an antibody, refers to any property exhibited by a polypeptide, including, but not limited to, binding specificity, structural configuration or conformation, protein stability, resistance to proteolysis, conformational stability, thermal tolerance, and tolerance to pH conditions. Changes in properties can alter an “activity” of the polypeptide. For example, a change in the binding specificity of the antibody polypeptide can alter the ability to bind an antigen, and/or various binding activities, such as affinity or avidity, or in vivo activities of the polypeptide.

[0344] As used herein, an “activity” or a “functional activity” of a polypeptide, such as an antibody, refers to any activity exhibited by the polypeptide. Such activities can be empirically determined Exemplary activities include, but are not limited to, ability to interact with a biomolecule, for example, through antigen-binding, DNA binding, ligand binding, or dimerization, enzymatic activity, for example, kinase activity or proteolytic activity. For an antibody (including antibody fragments), activities include, but are not limited to, the ability to specifically bind a particular antigen, affinity of antigen-binding (e.g., high or low affinity), avidity of antigen-binding (e.g., high or low avidity), on-rate, off-rate, effector functions, such as the ability to promote antigen neutralization or clearance, virus neutralization, and in vivo activities, such as the ability to prevent infection or invasion of a pathogen, or to promote clearance, or to penetrate a particular tissue or fluid or cell in the body. Activity can be assessed in vitro or in vivo using recognized assays, such as ELISA, flow cytometry, surface plasmon resonance or equivalent assays to measure on- or off-rate, immunohistochemistry and immunofluorescence histology and microscopy, cell-based assays, flow cytometry and binding assays (e.g., panning assays). For example, for an antibody polypeptide, activities can be assessed by measuring binding affinities, avidities, and/or binding coefficients (e.g., for on-/off-rates), and other activities in vitro or by measuring various effects in vivo, such as immune effects, e.g., antigen clearance; penetration or localization of the antibody into tissues; protection from disease, e.g., infection; serum or other fluid antibody titers; or other assays that are well-known in the art. The results of such assays that indicate that a polypeptide exhibits an activity can be correlated to activity of the polypeptide in vivo, in which in vivo activity can be referred to as therapeutic activity, or biological activity. Activity of a modified polypeptide can be any level of percentage of activity of the unmodified polypeptide, including but not limited to, 1% of the activity, 2%, 3%, 4%, 5%, 10%, 20%, 30%, 40%, 50%, 60%, 70%, 80%, 90%, 91%, 92%, 93%, 94%, 95%, 96%, 97%, 98%, 99%, 100%, 200%, 300%, 400%, 500%, or more of activity compared to the unmodified polypeptide. Assays to determine functionality or activity of modified (or variant) antibodies are well-known in the art.

[0345] As used herein, “bind,” “bound” or grammatical variations thereof refers to the participation of a molecule in any attractive interaction with another molecule, resulting in a stable association in which the two molecules are in close proximity to one another. Binding includes, but is not limited to, non-covalent bonds, covalent bonds (such as reversible and irreversible covalent bonds), and includes interactions between molecules such as, but not limited to, proteins, nucleic acids, carbohydrates, lipids, and small molecules, such as chemical compounds including drugs. Exemplary bonds are antibody-antigen interactions and receptor-ligand interactions. When an antibody “binds” a particular antigen, bind refers to the specific recognition of the antigen by the antibody, through cognate antibody-antigen interaction, at antibody combining sites. Binding also can include association of multiple chains of a polypeptide, such as antibody chains which interact through disulfide bonds.

[0346] As used herein, binding activity refers to characteristics of a molecule, e.g., a polypeptide, relating to whether or not, and how, it binds one or more binding partners. Binding activities include the ability to bind the binding partner(s), the affinity with which it binds to the binding partner (e.g., high affinity), the avidity with which it binds to the binding partner, the strength of the bond with the binding partner and/or specificity for binding with the binding partner.

[0347] As used herein, “affinity” or “binding affinity” describes the strength of the interaction between two or more molecules, such as binding partners, typically the strength of the noncovalent interactions between two binding partners. The affinity of an antibody or antigen-binding fragment thereof for an antigen epitope is the measure of the strength of the total noncovalent interactions between a single antibody combining site and the epitope. Low-affinity antibody-antigen interaction is weak, and the molecules tend to dissociate rapidly, while high affinity antibody-antigen-binding is strong and the molecules remain bound for a longer amount of time. Binding affinity can be determined in terms of binding kinetics, such as measuring rates of association (kₐ or kₒₙ) and/or dissociation (k_{d} or k_{off}), half maximal effective concentration (EC₅₀) values, and/or thermodynamic data (e.g., Gibbs free energy (ΔG), enthalpy (ΔH), entropy (−TΔS), and/or calculating association (Kₐ) or dissociation (K_{d}) constants.

[0348] EC₅₀, also called the apparent K_{d}, is the concentration (e.g., ng/mL) of antibody, where 50% of the maximal binding is observed to a fixed amount of antigen. Typically, EC₅₀ values are determined from sigmoidal dose-response curves, where the EC₅₀ is the concentration at the inflection point. A high antibody affinity for its substrate correlates with a low EC₅₀ value and a low affinity corresponds to a high EC₅₀ value. Affinity constants can be determined by standard kinetic methodology for antibody reactions, for example, immunoassays, such as ELISA, followed by curve-fitting analysis.

[0349] As used herein, “affinity constant” refers to an association constant (Kₐ) used to measure the affinity of an antibody for an antigen. The higher the affinity constant the greater the affinity of the antibody for the antigen. Affinity constants are expressed in units of reciprocal molarity (i.e., M⁻¹) and can be calculated from the rate constant for the association-dissociation reaction as measured by standard kinetic methodology for antibody reactions (e.g., immunoassays, surface plasmon resonance, or other kinetic interaction assays known in the art). The binding affinity of an antibody also can be expressed as a dissociation constant, or K_{d}. The dissociation constant is the reciprocal of the association constant, K_{d}=1/Kₐ. Hence, an affinity constant also can be represented by the K_{d}. Affinity constants can be determined by standard kinetic methodology for antibody reactions, for example, immunoassays, surface plasmon resonance (SPR) (Rich and Myszka (2000) Curr. Opin. Biotechnol 11:54; Englebienne (1998) Analyst. 123:1599), isothermal titration calorimetry (ITC) or other kinetic interaction assays known in the art (see, e.g., Paul, ed., Fundamental Immunology, 2nd ed., Raven Press, New York, pages 332-336 (1989); see also U.S. Pat. No. 7,229,619 for a description of exemplary SPR and ITC methods for calculating the binding affinity of antibodies). Instrumentation and methods for real time detection and monitoring of binding rates are known and are commercially available (e.g., BIAcore 2000, BIAcore AB, Upsala, Sweden and GE Healthcare Life Sciences; Malmqvist (2000) Biochem. Soc. Trans. 27:335).

[0350] Methods for calculating affinity are well-known, such as methods for determining EC₅₀ values or methods for determining association/dissociation constants. For example, in terms of EC₅₀, high binding affinity means that the antibody specifically binds to a target protein with an EC₅₀ that is less than about 10 ng/mL, 9 ng/mL, 8 ng/mL, 7 ng/mL, 6 ng/mL, 5 ng/mL, 3 ng/mL, 2 ng/mL, 1 ng/mL or less. High binding affinity also can be characterized by an equilibrium dissociation constant (K_{d}) of 10⁻⁶ M or lower, such as 10⁻⁷ M, 10⁻⁸ M, 10⁻¹⁰ M, 10⁻¹¹ M or 10⁻¹² M or lower. In terms of equilibrium association constant (Kₐ), high binding affinity is generally associated with Kₐ values of greater than or equal to about 10⁶ M⁻¹, greater than or equal to about 10⁷M⁻¹, greater than or equal to about 10⁸ M⁻¹, or greater than or equal to about 10⁹ M⁻¹, 10¹⁰ M⁻¹, 10¹¹ M⁻¹ or 10¹² M⁻¹. Affinity can be estimated empirically or affinities can be determined comparatively, e.g., by comparing the affinity of two or more antibodies for a particular antigen, for example, by calculating pairwise ratios of the affinities of the antibodies tested. For example, such affinities can be readily determined using conventional techniques, such as by ELISA; equilibrium dialysis; surface plasmon resonance; by radioimmunoassay using radiolabeled target antigen; or by another method known to the skilled artisan. The affinity data can be analyzed, for example, by the method of Scatchard et al., Ann N.Y. Acad. Sci., 51:660 (1949) or by curve fitting analysis, for example, using a 4 Parameter Logistic nonlinear regression model using the equation: y=((A−D)/(1+((x/C)̂B)))+D, where A is the minimum asymptote, B is the slope factor, C is the inflection point (EC₅₀), and D is the maximum asymptote.

[0351] As used herein, antibody avidity refers to the strength of multiple interactions between a multivalent antibody and its cognate antigen, such as with antibodies containing multiple binding sites associated with an antigen with repeating epitopes or an epitope array. A high avidity antibody has a higher strength of such interactions compared to a low avidity antibody.

[0352] As used herein, “exhibits at least one activity” or “retains at least one activity” refers to the activity exhibited by a modified polypeptide, such as a variant antibody or other therapeutic polypeptide (e.g., a modified anti-EGFR antibody or antigen-binding fragment thereof), compared to the target or unmodified polypeptide, that does not contain the modification. A modified, or variant, polypeptide that retains an activity of a target polypeptide can exhibit improved activity, decreased activity, or maintain the activity of the unmodified polypeptide. In some instances, a modified, or variant, polypeptide can retain an activity that is increased compared to a target or unmodified polypeptide. In some cases, a modified, or variant, polypeptide can retain an activity that is decreased compared to an unmodified or target polypeptide. Activity of a modified, or variant, polypeptide can be any level of percentage of activity of the unmodified or target polypeptide, including but not limited to, 1% of the activity, 2%, 3%, 4%, 5%, 10%, 20%, 30%, 40%, 50%, 60%, 70%, 80%, 90%, 91%, 92%, 93%, 94%, 95%, 96%, 97%, 98%, 99%, 100%, 200%, 300%, 400%, 500%, or more activity compared to the unmodified or target polypeptide. In other embodiments, the change in activity is at least about 2 times, 3 times, 4 times, 5 times, 6 times, 7 times, 8 times, 9 times, 10 times, 20 times, 30 times, 40 times, 50 times, 60 times, 70 times, 80 times, 90 times, 100 times, 200 times, 300 times, 400 times, 500 times, 600 times, 700 times, 800 times, 900 times, 1000 times, or more times greater than unmodified or target polypeptide. Assays for retention of an activity depend on the activity to be retained. Such assays can be performed in vitro or in vivo. Activity can be measured, for example, using assays known in the art and described in the Examples below for activities, such as, but not limited to, ELISA and panning assays. Activities of a modified, or variant, polypeptide compared to an unmodified or target polypeptide also can be assessed in terms of an in vivo therapeutic or biological activity or result following administration of the polypeptide.

[0353] As used herein, “increased activity” with reference to a modified anti-EGFR antibody means that, when tested under the same conditions, the modified anti-EGFR antibody exhibits greater activity compared to an unmodified anti-EGFR antibody not containing the amino acid replacement(s). For example, a modified anti-EGFR antibody exhibits at least or about at least 110%, 120%, 130%, 140%, 150%, 160%, 170%, 180%, 190%, 200%, 250%, 300%, 400%, 500%, 600%, 700%, 800%, 900%, 1000% or more of the activity of the unmodified or reference anti-EGFR antibody.

[0354] As used herein, the term “the same,” when used in reference to antibody binding affinity, means that the EC₅₀, association constant (Kₐ) or dissociation constant (Kd) is within about 1 to 100 fold or 1 to 10 fold of that of the reference antibody (1-100 fold greater affinity or 1-100 fold less affinity, or any numerical value or range or value within such ranges, than the reference antibody).

[0355] As used herein, “substantially the same” when used in reference to EC₅₀, association constant (Kₐ) or dissociation constant (K_{d}), means that the Kₐ, K_{d} or EC₅₀ is within about 5 to 5000 fold greater or less than the Kₐ, K_{d} or EC₅₀, of the reference antibody (5-5000 fold greater or 5-5000 fold less than the reference antibody).

[0356] As used herein, “specifically binds” or “immunospecifically binds” with respect to an antibody or antigen-binding fragment thereof are used interchangeably herein and refer to the ability of the antibody or antigen-binding fragment to form one or more noncovalent bonds with a cognate antigen, by noncovalent interactions between the antibody combining site(s) of the antibody and the antigen. Typically, an antibody that immunospecifically binds (or that specifically binds) to EGFR is one that binds to EGFR with an affinity constant Kₐ of about or 1×10⁷ M⁻¹ or 1×10⁸M⁻¹ or greater (or a dissociation constant (K_{d}) of 1×10⁻⁷ M or 1×10⁻⁸M or less). Antibodies or antigen-binding fragments that immunospecifically bind to a particular antigen (e.g., EGFR) can be identified, for example, by immunoassays, such as radioimmunoassays (RIA), enzyme-linked immunosorbent assays (ELISAs), surface plasmon resonance, or other techniques known to those of skill in the art.

[0357] As used herein, the term “surface plasmon resonance” refers to an optical phenomenon that allows for the analysis of real-time interactions by detection of alterations in protein concentrations within a biosensor matrix, for example, using the BIAcore system (GE Healthcare Life Sciences).

[0358] As used herein, “antibody” refers to immunoglobulins and immunoglobulin fragments, whether natural or partially or wholly synthetically, such as recombinantly, produced, including any fragment thereof containing at least a portion of the variable heavy chain and light region of the immunoglobulin molecule that is sufficient to form an antigen binding site and, when assembled, to specifically bind antigen. Hence, an antibody includes any protein having a binding domain that is homologous or substantially homologous to an immunoglobulin antigen-binding domain (antibody combining site). For example, an antibody refers to an antibody that contains two heavy chains (which can be denoted H and H′) and two light chains (which can be denoted L and L′), where each heavy chain can be a full-length immunoglobulin heavy chain or a portion thereof sufficient to form an antigen binding site (e.g., heavy chains include, but are not limited to, VH chains, VH-CH1 chains and VH-CH1-CH2-CH3 chains), and each light chain can be a full-length light chain or a portion thereof sufficient to form an antigen binding site (e.g., light chains include, but are not limited to, VL chains and VL-CL chains). Each heavy chain (H and H′) pairs with one light chain (L and L′, respectively). Typically, antibodies minimally include all or at least a portion of the variable heavy (VH) chain and/or the variable light (VL) chain. The antibody also can include all or a portion of the constant region.

[0359] For purposes herein, the term antibody includes full-length antibodies and portions thereof including antibody fragments, such as anti-EGFR antibody fragments. Antibody fragments, include, but are not limited to, Fab fragments, Fab′ fragments, F(ab)₂ fragments, Fv fragments, disulfide-linked Fvs (dsFv), Fd fragments, Fd′ fragments, single-chain Fvs (scFv), single-chain Fabs (scFab), diabodies, anti-idiotypic (anti-Id) antibodies, or antigen-binding fragments of any of the above. Antibody also includes synthetic antibodies, recombinantly produced antibodies, multispecific antibodies (e.g., bispecific antibodies), human antibodies, non-human antibodies, humanized antibodies, chimeric antibodies, and intrabodies. Antibodies provided herein include members of any immunoglobulin class (e.g., IgG, IgM, IgD, IgE, IgA and IgY), any subclass (e.g., IgG1, IgG2, IgG3, IgG4, IgA1 and IgA2) or sub-subclass (e.g., IgG2a and IgG2b).

[0360] As used herein, a form of an antibody refers to a particular structure of an antibody. Antibodies herein include full length antibodies and portions thereof, such as, for example, a Fab fragment or other antibody fragment. Thus, a Fab is a particular form of an antibody.

[0361] As used herein, reference to a “corresponding form” of an antibody means that when comparing a property or activity of two antibodies, the property is compared using the same form of the antibody. For example, if it is stated that an antibody has less activity compared to the activity of the corresponding form of a first antibody, that means that a particular form, such as a Fab of that antibody, has less activity compared to the Fab form of the first antibody.

[0362] As used herein, a full-length antibody is an antibody having two full-length heavy chains (e.g., VH-CH1-CH2-CH3 or VH-CH1-CH2-CH3-CH4) and two full-length light chains (VL-CL) and hinge regions, such as human antibodies produced by antibody secreting B cells and antibodies with the same domains that are produced synthetically.

[0363] As used herein, antibody fragment or antibody portion refers to any portion of a full-length antibody that is less than full length but contains at least a portion of the variable region of the antibody sufficient to form an antigen binding site (e.g., one or more CDRs) and thus retains the binding specificity and/or an activity of the full-length antibody; antibody fragments include antibody derivatives produced by enzymatic treatment of full-length antibodies, as well as synthetically, e.g., recombinantly produced derivatives. Examples of antibody fragments include, but are not limited to, Fab, Fab′, F(ab)₂, single-chain Fvs (scFv), Fv, dsFv, diabody, Fd and Fd fragments (see, for example, Methods in Molecular Biology, Vol 207: Recombinant Antibodies for Cancer Therapy Methods and Protocols (2003); Chapter 1; p 3-25, Kipriyanov). The fragment can include multiple chains linked together, such as by disulfide bridges and/or by peptide linkers. An antibody fragment generally contains at least about 50 amino acids and typically at least 200 amino acids.

[0364] As used herein, an Fv antibody fragment is composed of one variable heavy domain (V_{H}) and one variable light (V_{L}) domain linked by noncovalent interactions.

[0365] As used herein, a dsFv refers to an Fv with an engineered intermolecular disulfide bond, which stabilizes the V_{H}-V_{L} pair.

[0366] As used herein, an Fd fragment is a fragment of an antibody containing a variable domain (V_{H}) and one constant region domain (C_{H}1) of an antibody heavy chain.

[0367] As used herein, a Fab fragment is an antibody fragment that results from digestion of a full-length immunoglobulin with papain, or a fragment having the same structure that is produced synthetically, e.g., by recombinant methods. A Fab fragment contains a light chain (containing a V_{L} and C_{L}) and another chain containing a variable domain of a heavy chain (V_{H}) and one constant region domain of the heavy chain (C_{H}1).

[0368] As used herein, a F(ab′)₂ fragment is an antibody fragment that results from digestion of an immunoglobulin with pepsin at pH 4.0-4.5, or a fragment having the same structure that is produced synthetically, e.g., by recombinant methods. The F(ab′)₂ fragment essentially contains two Fab fragments where each heavy chain portion contains an additional few amino acids, including cysteine residues that form disulfide linkages joining the two fragments.

[0369] As used herein, a Fab′ fragment is a fragment containing one half (one heavy chain and one light chain) of the F(ab′)₂ fragment.

[0370] As used herein, an Fd′ fragment is a fragment of an antibody containing one heavy chain portion of a F(ab′)₂ fragment.

[0371] As used herein, an Fv′ fragment is a fragment containing only the V_{H} and V_{L} domains of an antibody molecule.

[0372] As used herein, hsFv refers to antibody fragments in which the constant domains normally present in a Fab fragment have been substituted with a heterodimeric coiled-coil domain (see, e.g., Arndt et al. (2001) J Mol Biol. 7:312:221-228).

[0373] As used herein, an scFv fragment refers to an antibody fragment that contains a variable light chain (V_{L}) and variable heavy chain (V_{H}), covalently connected by a polypeptide linker in any order. The linker is of a length such that the two variable domains are bridged without substantial interference. Exemplary linkers are (Gly-Ser)ₙ residues with some Glu or Lys residues dispersed throughout to increase solubility.

[0374] As used herein, diabodies are dimeric scFv; diabodies typically have shorter peptide linkers than scFvs, and preferentially dimerize.

[0375] As used herein, a polypeptide “domain” is a part of a polypeptide (a sequence of three or more, generally 5, 10 or more amino acids) that is structurally and/or functionally distinguishable or definable. An exemplary polypeptide domain is a part of the polypeptide that can form an independently folded structure within a polypeptide made up of one or more structural motifs (e.g., combinations of alpha helices and/or beta strands connected by loop regions) and/or that is recognized by a particular functional activity, such as enzymatic activity, dimerization or antigen-binding. A polypeptide can have one or more, typically more than one, distinct domains. For example, the polypeptide can have one or more structural domains and one or more functional domains. A single polypeptide domain can be distinguished based on structure and function. A domain can encompass a contiguous linear sequence of amino acids. Alternatively, a domain can encompass a plurality of non-contiguous amino acid portions, which are non-contiguous along the linear sequence of amino acids of the polypeptide. Typically, a polypeptide contains a plurality of domains. For example, each heavy chain and each light chain of an antibody molecule contains a plurality of immunoglobulin (Ig) domains, each about 110 amino acids in length. Those of skill in the art are familiar with polypeptide domains and can identify them by virtue of structural and/or functional homology with other such domains. For exemplification herein, definitions are provided, but it is understood that it is well within the skill in the art to recognize particular domains by name. If needed, appropriate software can be employed to identify domains.

[0376] As used herein, a functional region of a polypeptide is a region of the polypeptide that contains at least one functional domain (which imparts a particular function, such as an ability to interact with a biomolecule, for example, through antigen-binding, DNA binding, ligand binding, or dimerization, or by enzymatic activity, for example, kinase activity or proteolytic activity); exemplary functional regions of polypeptides are antibody domains, such as V_{H}, V_{L}, C_{H}, C_{L}, and portions thereof, such as CDRs, including CDR1, CDR2 and CDR3, or antigen-binding portions, such as antibody combining sites.

[0377] As used herein, a structural region of a polypeptide is a region of the polypeptide that contains at least one structural domain.

[0378] As used herein, an Ig domain is a domain, recognized as such by those in the art, that is distinguished by a structure, called the Immunoglobulin (Ig) fold, which contains two beta-pleated sheets, each containing anti-parallel beta strands of amino acids connected by loops. The two beta sheets in the Ig fold are sandwiched together by hydrophobic interactions and a conserved intra-chain disulfide bond. Individual immunoglobulin domains within an antibody chain further can be distinguished based on function. For example, a light chain contains one variable region domain (VL) and one constant region domain (CL), while a heavy chain contains one variable region domain (VH) and three or four constant region domains (CH). Each VL, CL, VH, and CH domain is an example of an immunoglobulin domain.

[0379] As used herein, a variable domain with reference to an antibody is a specific Ig domain of an antibody heavy or light chain that contains a sequence of amino acids that varies among different antibodies. Each light chain and each heavy chain has one variable region domain (VL and VH). The variable domains provide antigen specificity, and thus are responsible for antigen recognition. Each variable region contains CDRs that are part of the antigen binding site domain and framework regions (FRs).

[0380] As used herein, “hypervariable region,” “HV,” “complementarity-determining region,” “CDR” and “antibody CDR” are used interchangeably to refer to one of a plurality of portions within each variable region that together form an antigen binding site of an antibody. Each variable region domain contains three CDRs, named CDR1, CDR2, and CDR3. The three CDRs are non-contiguous along the linear amino acid sequence, but are proximate in the folded polypeptide. The CDRs are located within the loops that join the parallel strands of the beta sheets of the variable domain.

[0381] As used herein, “antigen-binding domain,” “antigen-binding site,” “antigen combining site” and “antibody combining site” are used synonymously to refer to a domain within an antibody that recognizes and physically interacts with the cognate antigen. A native conventional full-length antibody molecule has two conventional antigen-binding sites, each containing portions of a heavy chain variable region and portions of a light chain variable region. A conventional antigen-binding site contains the loops that connect the anti-parallel beta strands within the variable region domains. The antigen combining sites can contain other portions of the variable region domains. Each conventional antigen-binding site contains three hypervariable regions from the heavy chain and three hypervariable regions from the light chain. The hypervariable regions also are called complementarity-determining regions (CDRs).

[0382] As used herein, “portion thereof” with reference to an antibody heavy or light chain or variable heavy or light chain refers to a contiguous portion thereof that is sufficient to form an antigen binding site such that, when assembled into an antibody containing a heavy and light chain, it contains at least 1 or 2, typically 3, 4, 5 or all 6 CDRs of the variable heavy (VH) and variable light (VL) chains sufficient to retain at least a portion of the binding specificity of the corresponding full-length antibody containing all 6 CDRs. Generally, a sufficient antigen binding site requires CDR3 of the heavy chain (CDRH3). It typically further requires the CDR3 of the light chain (CDRL3). As described herein, one of skill in the art knows and can identify the CDRs based on Kabat or Chothia numbering (see e.g., Kabat, E. A. et al. (1991) Sequences of Proteins of Immunological Interest, Fifth Edition, U.S. Department of Health and Human Services, NIH Publication No. 91-3242, and Chothia, C. et al. (1987)J. Mol. Biol. 196:901-917).

[0383] As used herein, framework regions (FRs) are the domains within the antibody variable region domains that are located within the beta sheets; the FR regions are comparatively more conserved, in terms of their amino acid sequences, than the hypervariable regions.

[0384] As used herein, a constant region domain is a domain in an antibody heavy or light chain that contains a sequence of amino acids that is comparatively more conserved among antibodies than the variable region domain. Each light chain has a single light chain constant region (CL) domain and each heavy chain contains one or more heavy chain constant region (CH) domains, which include, CH1, CH2, CH3 and CH4. Full-length IgA, IgD and IgG isotypes contain CH1, CH2, CH3 and a hinge region, while IgE and IgM contain CH1, CH2, CH3 and CH4. CH1 and CL domains extend the Fab arm of the antibody molecule, thus contributing to the interaction with antigen and rotation of the antibody arms. Antibody constant regions can serve effector functions, such as, but not limited to, clearance of antigens, pathogens and toxins to which the antibody specifically binds, e.g., through interactions with various cells, biomolecules and tissues.

[0385] As used herein, “Kabat numbering” refers to the index numbering of the IgG1 Kabat antibody (see e.g., Kabat, E. A. et al. (1991) Sequences of Proteins of Immunological Interest, Fifth Edition, U.S. Department of Health and Human Services, NIH Publication No. 91-3242). For example, based on Kabat numbering, CDR-LI corresponds to residues L24-L34; CDR-L2 corresponds to residues L50-L56; CDR-L3 corresponds to residues L89-L97; CDR-H1 corresponds to residues H31-H35, 35a or 35b depending on the length; CDR-H2 corresponds to residues H50-H65; and CDR-H3 corresponds to residues H95-H102. One of skill in the art can identify regions of the constant region using Kabat. Tables 1 and 2 set forth corresponding residues using kabat numbering and EU numbering schemes for the exemplary antibody cetuximab.

[0386] As used herein, “EU numbering” or “EU index” refer to the numbering scheme of the EU antibody described in Edelman et al., Proc Natl. Acad. Sci. USA 63 (1969) 78-85. “EU index as in Kabat” refers to EU index numbering of the human IgG1 Kabat antibody as set forth in Kabat, E. A. et al. (1991) Sequences of Proteins of Immunological Interest, Fifth Edition, U.S. Department of Health and Human Services, NIH Publication No. 91-3242. EU numbering or EU numbering as in Kabat are frequently used by those of skill in the art to number amino acid residues of the Fc regions of the light and heavy antibody chains. For example, one of skill in the art can identify regions of the constant region using EU numbering. For example, the CL domain corresponds to residues L108-L216 according to Kabat numbering or L108-L214 according to EU numbering. CH1 corresponds to residues 118-215 (EU numbering) or 114-223 (Kabat numbering); CH2 corresponds to residues 231-340 (EU numbering) or 244-360 (Kabat numbering); CH3 corresponds to residues 341-446 (EU numbering) or 361-478 (Kabat numbering) domain corresponds to; CDR-L2 corresponds to residues L50-L56; CDR-L3 corresponds to residues L89-L97; CDR-H1 corresponds to residues H31-H35, 35a or 35b depending on the length; CDR-H2 corresponds to residues H50-H65; and CDR-H3 corresponds to residues H95-H102. Tables 1 and 2 set forth corresponding residues using Kabat and EU numbering for the exemplary antibody cetuximab. The top row (bold) sets forth the amino acid residue number; the second row (bold) provides the 1-letter code for the amino acid residue at the position indicated by the number in the top row; the third row (italic) indicates the corresponding Kabat number according to Kabat numbering; and the fourth row (not-bold, not-italic) indicates the corresponding EU index number according to EU numbering.

TABLE 1
Kabat and EU Numbering of Cetuximab Light Chain

| 1 | 2 | 3 | 4 | 5 | 6 | 7 | 8 | 9 | 10 | 11 | 12 | 13 | 14 | 15 |
|---|---|---|---|---|---|---|---|---|---|---|---|---|---|---|
| D | I | L | L | T | Q | S | P | V | I | L | S | V | S | P |
| 1 | 2 | 3 | 4 | 5 | 6 | 7 | 8 | 9 | 10 | 11 | 12 | 13 | 14 | 15 |
| 1 | 2 | 3 | 4 | 5 | 6 | 7 | 8 | 9 | 10 | 11 | 12 | 13 | 14 | 15 |
| 16 | 17 | 18 | 19 | 20 | 21 | 22 | 23 | 24 | 25 | 26 | 27 | 28 | 29 | 30 |
| G | E | R | V | S | F | S | C | R | A | S | Q | S | I | G |
| 16 | 17 | 18 | 19 | 20 | 21 | 22 | 23 | 24 | 25 | 26 | 27 | 28 | 29 | 30 |
| 16 | 17 | 18 | 19 | 20 | 21 | 22 | 23 | 24 | 25 | 26 | 27 | 28 | 29 | 30 |
| 31 | 32 | 33 | 34 | 35 | 36 | 37 | 38 | 39 | 40 | 41 | 42 | 43 | 44 | 45 |
| T | N | I | H | W | Y | Q | Q | R | T | N | G | S | P | R |
| 31 | 32 | 33 | 34 | 35 | 36 | 37 | 38 | 39 | 40 | 41 | 42 | 43 | 44 | 45 |
| 31 | 32 | 33 | 34 | 35 | 36 | 37 | 38 | 39 | 40 | 41 | 42 | 43 | 44 | 45 |
| 46 | 47 | 48 | 49 | 50 | 51 | 52 | 53 | 54 | 55 | 56 | 57 | 58 | 59 | 60 |
| L | L | I | K | Y | A | S | E | S | I | S | G | I | P | S |
| 46 | 47 | 48 | 49 | 50 | 51 | 52 | 53 | 54 | 55 | 56 | 57 | 58 | 59 | 60 |
| 46 | 47 | 48 | 49 | 50 | 51 | 52 | 53 | 54 | 55 | 56 | 57 | 58 | 59 | 60 |
| 61 | 62 | 63 | 64 | 65 | 66 | 67 | 68 | 69 | 70 | 71 | 72 | 73 | 74 | 75 |
| R | F | S | G | S | G | S | G | T | D | F | T | L | S | I |
| 61 | 62 | 63 | 64 | 65 | 66 | 67 | 68 | 69 | 70 | 77 | 72 | 73 | 74 | 75 |
| 61 | 62 | 63 | 64 | 65 | 66 | 67 | 68 | 69 | 70 | 71 | 72 | 73 | 74 | 75 |
| 76 | 77 | 78 | 79 | 80 | 81 | 82 | 83 | 84 | 85 | 86 | 87 | 88 | 89 | 90 |
| N | S | V | E | S | E | D | I | A | D | Y | Y | C | Q | Q |
| 76 | 77 | 78 | 79 | 80 | 81 | 82 | 83 | 84 | 85 | 86 | 87 | 88 | 89 | 90 |
| 76 | 77 | 78 | 79 | 80 | 81 | 82 | 83 | 84 | 85 | 86 | 87 | 88 | 89 | 90 |
| 91 | 92 | 93 | 94 | 95 | 96 | 97 | 98 | 99 | 100 | 101 | 102 | 103 | 104 | 105 |
| N | N | N | W | P | T | T | F | G | A | G | T | K | L | E |
| 91 | 92 | 93 | 94 | 95 | 96 | 97 | 98 | 99 | 100 | 101 | 102 | 103 | 104 | 105 |
| 91 | 92 | 93 | 94 | 95 | 96 | 97 | 98 | 99 | 100 | 101 | 102 | 103 | 104 | 105 |
| 106 | 107 | 108 | 109 | 110 | 111 | 112 | 113 | 114 | 115 | 116 | 117 | 118 | 119 | 120 |
| L | K | R | T | V | A | A | P | S | V | F | I | F | P | P |
| 106 | 107 | 108 | 109 | 110 | 111 | 112 | 113 | 114 | 115 | 116 | 117 | 118 | 119 | 120 |
| 106 | 107 | 108 | 109 | 110 | 111 | 112 | 113 | 114 | 115 | 116 | 117 | 118 | 119 | 120 |
| 121 | 122 | 123 | 124 | 125 | 126 | 127 | 128 | 129 | 130 | 131 | 132 | 133 | 134 | 135 |
| S | D | E | Q | L | K | S | G | T | A | S | V | V | C | L |
| 121 | 122 | 123 | 124 | 125 | 126 | 127 | 128 | 129 | 130 | 137 | 132 | 133 | 134 | 135 |
| 121 | 122 | 123 | 124 | 125 | 126 | 127 | 128 | 129 | 130 | 131 | 132 | 133 | 134 | 135 |
| 136 | 137 | 138 | 139 | 140 | 141 | 142 | 143 | 144 | 145 | 146 | 147 | 148 | 149 | 150 |
| L | N | N | F | Y | P | R | E | A | K | V | Q | W | K | V |
| 136 | 137 | 138 | 139 | 140 | 147 | 142 | 143 | 144 | 145 | 146 | 147 | 148 | 149 | 150 |
| 136 | 137 | 138 | 139 | 140 | 141 | 142 | 143 | 144 | 145 | 146 | 147 | 148 | 149 | 150 |
| 151 | 152 | 153 | 154 | 155 | 156 | 157 | 158 | 159 | 160 | 161 | 162 | 163 | 164 | 165 |
| D | N | A | L | Q | S | G | N | S | Q | E | S | V | T | E |
| 151 | 152 | 153 | 154 | 155 | 156 | 157 | 158 | 159 | 160 | 161 | 162 | 163 | 164 | 165 |
| 151 | 152 | 153 | 154 | 155 | 156 | 157 | 158 | 159 | 160 | 161 | 162 | 163 | 164 | 165 |
| 166 | 167 | 168 | 169 | 170 | 171 | 172 | 173 | 174 | 175 | 176 | 177 | 178 | 179 | 180 |
| Q | D | S | K | D | S | T | Y | S | L | S | S | T | L | T |
| 166 | 167 | 168 | 169 | 170 | 171 | 172 | 173 | 174 | 175 | 176 | 177 | 178 | 179 | 180 |
| 166 | 167 | 168 | 169 | 170 | 171 | 172 | 173 | 174 | 175 | 176 | 177 | 178 | 179 | 180 |
| 181 | 182 | 183 | 184 | 185 | 186 | 187 | 188 | 189 | 190 | 191 | 192 | 193 | 194 | 195 |
| L | S | K | A | D | Y | E | K | H | K | V | Y | A | C | E |
| 181 | 182 | 183 | 184 | 185 | 186 | 187 | 188 | 189 | 190 | 191 | 192 | 193 | 194 | 195 |
| 181 | 182 | 183 | 184 | 185 | 186 | 187 | 188 | 189 | 190 | 191 | 192 | 193 | 194 | 195 |
| 196 | 197 | 198 | 199 | 200 | 201 | 202 | 203 | 204 | 205 | 206 | 207 | 208 | 209 | 210 |
| V | T | H | Q | G | L | S | S | P | V | T | K | S | F | N |
| 196 | 197 | 198 | 199 | 200 | 201 | 202 | 203 | 204 | 205 | 206 | 207 | 208 | 209 | 210 |
| 196 | 197 | 198 | 199 | 200 | 201 | 202 | 203 | 204 | 205 | 206 | 207 | 208 | 209 | 210 |

| | | |
|---|---|---|
| 211 | 212 | 213 |
| R | G | A |
| 211 | 212 | 213 |
| 211 | 212 | 213 |

TABLE 2
Kabat and EU Numbering of Cetuximab Heavy Chain

| 1 | 2 | 3 | 4 | 5 | 6 | 7 | 8 | 9 | 10 | 11 | 12 | 13 | 14 | 15 |
|---|---|---|---|---|---|---|---|---|---|---|---|---|---|---|
| Q | V | Q | L | K | Q | S | G | P | G | L | V | Q | P | S |
| 1 | 2 | 3 | 4 | 5 | 6 | 7 | 8 | 9 | 10 | 11 | 12 | 13 | 14 | 15 |
| 1 | 2 | 3 | 4 | 5 | 6 | 7 | 8 | 9 | 10 | 11 | 12 | 13 | 14 | 15 |
| 16 | 17 | 18 | 19 | 20 | 21 | 22 | 23 | 24 | 25 | 26 | 27 | 28 | 29 | 30 |
| Q | S | L | S | I | T | C | T | V | S | G | F | S | L | T |
| 16 | 17 | 18 | 19 | 20 | 21 | 22 | 23 | 24 | 25 | 26 | 27 | 28 | 29 | 30 |
| 16 | 17 | 18 | 19 | 20 | 21 | 22 | 23 | 24 | 25 | 26 | 27 | 28 | 29 | 30 |
| 31 | 32 | 33 | 34 | 35 | 36 | 37 | 38 | 39 | 40 | 41 | 42 | 43 | 44 | 45 |
| N | Y | G | V | H | W | V | R | Q | S | P | G | K | G | L |
| 31 | 32 | 33 | 34 | 35 | 36 | 37 | 38 | 39 | 40 | 41 | 42 | 43 | 44 | 45 |
| 31 | 32 | 33 | 34 | 35 | 36 | 37 | 38 | 39 | 40 | 41 | 42 | 43 | 44 | 45 |
| 46 | 47 | 48 | 49 | 50 | 51 | 52 | 53 | 54 | 55 | 56 | 57 | 58 | 59 | 60 |
| E | W | L | G | V | I | W | S | G | G | N | T | D | Y | N |
| 46 | 47 | 48 | 49 | 50 | 51 | 52 | 53 | 54 | 55 | 56 | 57 | 58 | 59 | 60 |
| 46 | 47 | 48 | 49 | 51 | 52 | 53 | 54 | 55 | 56 | 57 | 58 | 59 | 60 | 61 |
| 61 | 62 | 63 | 64 | 65 | 66 | 67 | 68 | 69 | 70 | 71 | 72 | 73 | 74 | 75 |
| T | P | F | T | S | R | L | S | I | N | K | D | N | S | K |
| 61 | 62 | 63 | 64 | 65 | 66 | 67 | 68 | 69 | 70 | 71 | 72 | 73 | 74 | 75 |
| 62 | 63 | 64 | 65 | 66 | 67 | 68 | 69 | 70 | 71 | 72 | 73 | 74 | 75 | 76 |
| 76 | 77 | 78 | 79 | 80 | 81 | 82 | 83 | 84 | 85 | 86 | 87 | 88 | 89 | 90 |
| S | Q | V | F | F | K | M | N | S | L | Q | S | N | D | T |
| 76 | 77 | 78 | 79 | 80 | 81 | 82 | 82A | 82B | 82C | 83 | 84 | 85 | 86 | 87 |
| 77 | 78 | 79 | 80 | 81 | 82 | 83 | 84 | 85 | 86 | 87 | 88 | 89 | 90 | 91 |
| 91 | 92 | 93 | 94 | 95 | 96 | 97 | 98 | 99 | 100 | 101 | 102 | 103 | 104 | 105 |
| A | I | Y | Y | C | A | R | A | L | T | Y | Y | D | Y | E |
| 88 | 89 | 90 | 91 | 92 | 93 | 94 | 95 | 96 | 97 | 98 | 99 | 100 | 100A | 100B |
| 92 | 93 | 94 | 95 | 96 | 97 | 98 | 99 | 100 | 101 | 102 | 103 | 104 | 105 | 106 |
| 106 | 107 | 108 | 109 | 110 | 111 | 112 | 113 | 114 | 115 | 116 | 117 | 118 | 119 | 120 |
| F | A | Y | W | G | Q | G | T | L | V | T | V | S | A | A |
| 100C | 101 | 102 | 103 | 104 | 105 | 106 | 107 | 108 | 109 | 110 | 111 | 112 | 113 | 114 |
| — | 107 | 108 | 109 | 110 | — | 111 | — | 112 | 113 | 114 | 115 | 116 | 117 | 118 |
| 121 | 122 | 123 | 124 | 125 | 126 | 127 | 128 | 129 | 130 | 131 | 132 | 133 | 134 | 135 |
| S | T | K | G | P | S | V | F | P | L | A | P | S | S | K |
| 115 | 116 | 117 | 118 | 119 | 120 | 121 | 122 | 123 | 124 | 125 | 126 | 127 | 128 | 129 |
| 119 | 120 | 121 | 122 | 123 | 124 | 125 | 126 | 127 | 128 | 129 | 130 | 131 | 132 | 133 |
| 136 | 137 | 138 | 139 | 140 | 141 | 142 | 143 | 144 | 145 | 146 | 147 | 148 | 149 | 150 |
| S | T | S | G | G | T | A | A | L | G | C | L | V | K | D |
| 130 | 133 | 134 | 135 | 136 | 137 | 138 | 139 | 140 | 141 | 142 | 143 | 144 | 145 | 146 |
| 134 | 135 | 136 | 137 | 138 | 139 | 140 | 141 | 142 | 143 | 144 | 145 | 146 | 147 | 148 |
| 151 | 152 | 153 | 154 | 155 | 156 | 157 | 158 | 159 | 160 | 161 | 162 | 163 | 164 | 165 |
| Y | F | P | E | P | V | T | V | S | W | N | S | G | A | L |
| 147 | 148 | 149 | 150 | 151 | 152 | 153 | 154 | 156 | 157 | 162 | 163 | 164 | 165 | 166 |
| 149 | 150 | 151 | 152 | 153 | 154 | 155 | 156 | 157 | 158 | 159 | 160 | 161 | 162 | 163 |
| 166 | 167 | 168 | 169 | 170 | 171 | 172 | 173 | 174 | 175 | 176 | 177 | 178 | 179 | 180 |
| T | S | G | V | H | T | F | P | A | V | L | Q | S | S | G |
| 167 | 168 | 169 | 171 | 172 | 173 | 174 | 175 | 176 | 177 | 178 | 179 | 180 | 182 | 183 |
| 164 | 165 | 166 | 167 | 168 | 169 | 170 | 171 | 172 | 173 | 174 | 175 | 176 | 177 | 178 |
| 181 | 182 | 183 | 184 | 185 | 186 | 187 | 188 | 189 | 190 | 191 | 192 | 193 | 194 | 195 |
| L | Y | S | L | S | S | V | V | T | V | P | S | S | S | L |
| 184 | 185 | 186 | 187 | 188 | 189 | 190 | 191 | 192 | 193 | 194 | 195 | 196 | 197 | 198 |
| 179 | 180 | 181 | 182 | 183 | 184 | 185 | 186 | 187 | 188 | 189 | 190 | 191 | 192 | 193 |
| 196 | 197 | 198 | 199 | 200 | 201 | 202 | 203 | 204 | 205 | 206 | 207 | 208 | 209 | 210 |
| G | T | Q | T | Y | I | C | N | V | N | H | K | P | S | N |
| 199 | 200 | 203 | 205 | 206 | 207 | 208 | 209 | 210 | 211 | 212 | 213 | 214 | 215 | 216 |
| 194 | 195 | 196 | 197 | 198 | 199 | 200 | 201 | 202 | 203 | 204 | 205 | 206 | 207 | 208 |
| 211 | 212 | 213 | 214 | 215 | 216 | 217 | 218 | 219 | 220 | 221 | 222 | 223 | 224 | 225 |
| T | K | V | D | K | R | V | E | P | K | S | C | D | K | T |
| 217 | 218 | 219 | 220 | 221 | 222 | 223 | 226 | 227 | 228 | 232 | 233 | 234 | 235 | 236 |
| 209 | 210 | 211 | 212 | 213 | 214 | 215 | 216 | 217 | 218 | 219 | 220 | 221 | 222 | 223 |
| 226 | 227 | 228 | 229 | 230 | 231 | 232 | 233 | 234 | 235 | 236 | 237 | 238 | 239 | 240 |
| H | T | C | P | P | C | P | A | P | E | L | L | G | G | P |
| 237 | 238 | 239 | 240 | 241 | 242 | 243 | 244 | 245 | 246 | 247 | 248 | 249 | 250 | 251 |
| 224 | 225 | 226 | 227 | 228 | 229 | 230 | 231 | 232 | 233 | 234 | 235 | 236 | 237 | 238 |
| 241 | 242 | 243 | 244 | 245 | 246 | 247 | 248 | 249 | 250 | 251 | 252 | 253 | 254 | 255 |
| S | V | F | L | F | P | P | K | P | K | D | T | L | M | I |
| 252 | 253 | 254 | 255 | 256 | 257 | 258 | 259 | 260 | 261 | 262 | 263 | 264 | 265 | 266 |
| 239 | 240 | 241 | 242 | 243 | 244 | 245 | 246 | 247 | 248 | 249 | 250 | 251 | 252 | 253 |
| 256 | 257 | 258 | 259 | 260 | 261 | 262 | 263 | 264 | 265 | 266 | 267 | 268 | 269 | 270 |
| S | R | T | P | E | V | T | C | V | V | V | D | V | S | H |
| 267 | 268 | 269 | 270 | 271 | 272 | 273 | 274 | 275 | 276 | 277 | 278 | 279 | 280 | 281 |
| 254 | 255 | 256 | 257 | 258 | 259 | 260 | 261 | 262 | 263 | 264 | 265 | 266 | 267 | 268 |
| 271 | 272 | 273 | 274 | 275 | 276 | 277 | 278 | 279 | 280 | 281 | 282 | 283 | 284 | 285 |
| E | D | P | E | V | K | F | N | W | Y | V | D | G | V | E |
| 282 | 283 | 284 | 285 | 286 | 287 | 288 | 289 | 290 | 291 | 292 | 295 | 296 | 299 | 300 |
| 269 | 270 | 271 | 272 | 273 | 274 | 275 | 276 | 277 | 278 | 279 | 280 | 281 | 282 | 283 |
| 286 | 287 | 288 | 289 | 290 | 291 | 292 | 293 | 294 | 295 | 296 | 297 | 298 | 299 | 300 |
| V | H | N | A | K | T | K | P | R | E | E | Q | Y | N | S |
| 301 | 302 | 303 | 304 | 305 | 306 | 307 | 308 | 309 | 310 | 311 | 312 | 313 | 314 | 317 |
| 284 | 285 | 286 | 287 | 288 | 289 | 290 | 291 | 292 | 293 | 294 | 295 | 296 | 297 | 298 |
| 301 | 302 | 303 | 304 | 305 | 306 | 307 | 308 | 309 | 310 | 311 | 312 | 313 | 314 | 315 |
| T | Y | R | V | V | S | V | L | T | V | L | H | Q | D | W |
| 318 | 319 | 320 | 321 | 322 | 323 | 324 | 325 | 326 | 327 | 328 | 329 | 330 | 331 | 332 |
| 299 | 300 | 301 | 302 | 303 | 304 | 305 | 306 | 307 | 308 | 309 | 310 | 311 | 312 | 313 |
| 316 | 317 | 318 | 319 | 320 | 321 | 322 | 323 | 324 | 325 | 326 | 327 | 328 | 329 | 330 |
| L | N | G | K | E | Y | K | C | K | V | S | N | K | A | L |
| 333 | 334 | 335 | 336 | 337 | 338 | 339 | 340 | 341 | 342 | 343 | 344 | 345 | 346 | 347 |
| 314 | 315 | 316 | 317 | 318 | 319 | 320 | 321 | 322 | 323 | 324 | 325 | 326 | 327 | 328 |
| 331 | 332 | 333 | 334 | 335 | 336 | 337 | 338 | 339 | 340 | 341 | 342 | 343 | 344 | 345 |
| P | A | P | I | E | K | T | I | S | K | A | K | G | Q | P |
| 348 | 349 | 350 | 351 | 352 | 353 | 354 | 355 | 357 | 358 | 359 | 360 | 361 | 363 | 364 |
| 329 | 330 | 331 | 332 | 333 | 334 | 335 | 336 | 337 | 338 | 339 | 340 | 341 | 342 | 343 |
| 346 | 347 | 348 | 349 | 350 | 351 | 352 | 353 | 354 | 355 | 356 | 357 | 358 | 359 | 360 |
| R | E | P | Q | V | Y | T | L | P | P | S | R | D | E | L |
| 365 | 366 | 367 | 368 | 369 | 370 | 371 | 372 | 373 | 374 | 375 | 376 | 377 | 378 | 381 |
| 344 | 345 | 346 | 347 | 348 | 349 | 350 | 351 | 352 | 353 | 354 | 355 | 356 | 357 | 358 |
| 361 | 362 | 363 | 364 | 365 | 366 | 367 | 368 | 369 | 370 | 371 | 372 | 373 | 374 | 375 |
| T | K | N | Q | V | S | L | T | C | L | V | K | G | F | Y |
| 382 | 383 | 384 | 385 | 386 | 387 | 388 | 389 | 390 | 391 | 392 | 393 | 394 | 395 | 396 |
| 359 | 360 | 361 | 362 | 363 | 364 | 365 | 366 | 367 | 368 | 369 | 370 | 371 | 372 | 373 |
| 376 | 377 | 378 | 379 | 380 | 381 | 382 | 383 | 384 | 385 | 386 | 387 | 388 | 389 | 390 |
| P | S | D | I | A | V | E | W | E | S | N | G | Q | P | E |
| 397 | 398 | 399 | 400 | 401 | 402 | 405 | 406 | 407 | 408 | 410 | 411 | 414 | 415 | 416 |
| 374 | 375 | 376 | 377 | 378 | 379 | 380 | 381 | 382 | 383 | 384 | 385 | 386 | 387 | 388 |
| 391 | 392 | 393 | 394 | 395 | 396 | 397 | 398 | 399 | 400 | 401 | 402 | 403 | 404 | 405 |
| N | N | Y | K | T | T | P | P | V | L | D | S | D | G | S |
| 417 | 418 | 419 | 420 | 421 | 422 | 423 | 424 | 425 | 426 | 427 | 428 | 430 | 433 | 434 |
| 389 | 390 | 391 | 392 | 393 | 394 | 395 | 396 | 397 | 398 | 399 | 400 | 401 | 402 | 403 |
| 406 | 407 | 408 | 409 | 410 | 411 | 412 | 413 | 414 | 415 | 416 | 417 | 418 | 419 | 420 |
| F | F | L | Y | S | K | L | T | V | D | K | S | R | W | Q |
| 435 | 436 | 437 | 438 | 439 | 440 | 441 | 442 | 443 | 444 | 445 | 446 | 447 | 448 | 449 |
| 404 | 405 | 406 | 407 | 408 | 409 | 410 | 411 | 412 | 413 | 414 | 415 | 416 | 417 | 418 |
| 421 | 422 | 423 | 424 | 425 | 426 | 427 | 428 | 429 | 430 | 431 | 432 | 433 | 434 | 435 |
| Q | G | N | V | F | S | C | S | V | M | H | E | A | L | H |
| 450 | 451 | 452 | 453 | 454 | 455 | 456 | 457 | 458 | 459 | 460 | 461 | 462 | 463 | 464 |
| 419 | 420 | 421 | 422 | 423 | 424 | 425 | 426 | 427 | 428 | 429 | 430 | 431 | 432 | 433 |

| | | | | | | | | | | | | | |
|---|---|---|---|---|---|---|---|---|---|---|---|---|---|
| 436 | 437 | 438 | 439 | 440 | 441 | 442 | 443 | 444 | 445 | 446 | 447 | 448 | 449 |
| N | H | Y | T | Q | K | S | L | S | L | S | P | G | K |
| 465 | 466 | 467 | 468 | 469 | 470 | 471 | 472 | 473 | 474 | 475 | 476 | 477 | 478 |
| 434 | 435 | 436 | 437 | 438 | 439 | 440 | 441 | 442 | 443 | 444 | 445 | 446 | — |

[0387] As used herein, “antibody hinge region” or “hinge region” refers to a polypeptide region that exists naturally in the heavy chain of the gamma, delta and alpha antibody isotypes, between the C_{H}1 and C_{H}2 domains that has no homology with the other antibody domains. This region is rich in proline residues and gives the IgG, IgD and IgA antibodies flexibility, allowing the two “arms” (each containing one antibody combining site) of the Fab portion to be mobile, assuming various angles with respect to one another as they bind antigen. This flexibility allows the Fab arms to move in order to align the antibody combining sites to interact with epitopes on cell surfaces or other antigens. Two interchain disulfide bonds within the hinge region stabilize the interaction between the two heavy chains. In some embodiments provided herein, the synthetically produced antibody fragments contain one or more hinge regions, for example, to promote stability via interactions between two antibody chains. Hinge regions are examples of dimerization domains.

[0388] As used herein, the phrase “derived from” when referring to antibody fragments derived from another antibody, such as a monoclonal antibody, refers to the engineering of antibody fragments (e.g., Fab, F(ab′), F(ab′)₂, single-chain Fv (scFv), Fv, dsFv, diabody, Fd and Fd′ fragments) that retain the binding specificity of the original antibody. Such fragments can be derived by a variety of methods known in the art, including, but not limited to, enzymatic cleavage, chemical crosslinking, recombinant means or combinations thereof. Generally, the derived antibody fragment shares the identical or substantially identical heavy chain variable region (V_{H}) and light chain variable region (V_{L}) of the parent antibody, such that the antibody fragment and the parent antibody bind the same epitope.

[0389] As used herein, a “parent antibody” or “source antibody” refers the to an antibody from which an antibody fragment (e.g., Fab, F(ab′), F(ab)₂, single-chain Fv (scFv), Fv, dsFv, diabody, Fd and Fd′ fragments) is derived.

[0390] As used herein, the term “epitope” refers to any antigenic determinant on an antigen to which the paratope of an antibody binds. Epitopic determinants typically contain chemically active surface groupings of molecules such as amino acids or sugar side chains and typically have specific three dimensional structural characteristics, as well as specific charge characteristics.

[0391] As used herein, humanized antibodies refer to antibodies that are modified to include “human” sequences of amino acids so that administration to a human does not provoke an immune response. A humanized antibody typically contains complementarity determining regions (CDRs or hypervariable loops) derived from a non-human species immunoglobulin and the remainder of the antibody molecule derived mainly from a human immunoglobulin. Methods for preparation of such antibodies are known. For example, DNA encoding a monoclonal antibody can be altered by recombinant DNA techniques to encode an antibody in which the amino acid composition of the non-variable regions is based on human antibodies. Methods for identifying such regions are known, including computer programs, which are designed for identifying the variable and non-variable regions of immunoglobulins. Hence, in general, the humanized antibody will contain substantially all of at least one, and typically two, variable domains, in which all or substantially all of the hypervariable loops (e.g., CDRs) correspond to those of a non-human immunoglobulin and all or substantially all of the FRs are those of a human immunoglobulin sequence. The humanized antibody optionally also will contain at least a portion of an immunoglobulin constant region (Fc), typically that of a human immunoglobulin.

[0392] As used herein, a multimerization domain refers to a sequence of amino acids that promotes stable interaction of a polypeptide molecule with one or more additional polypeptide molecules, each containing a complementary multimerization domain, which can be the same or a different multimerization domain to form a stable multimer with the first domain. Generally, a polypeptide is joined directly or indirectly to the multimerization domain. Exemplary multimerization domains include the immunoglobulin sequences or portions thereof, leucine zippers, hydrophobic regions, hydrophilic regions, and compatible protein-protein interaction domains. The multimerization domain, for example, can be an immunoglobulin constant region or domain, such as, for example, the Fc domain or portions thereof from IgG, including IgG1, IgG2, IgG3 or IgG4 subtypes, IgA, IgE, IgD and IgM and modified forms thereof

[0393] As used herein, dimerization domains are multimerization domains that facilitate interaction between two polypeptide sequences (such as, but not limited to, antibody chains). Dimerization domains include, but are not limited to, an amino acid sequence containing a cysteine residue that facilitates formation of a disulfide bond between two polypeptide sequences, such as all or part of a full-length antibody hinge region, or one or more dimerization sequences, which are sequences of amino acids known to promote interaction between polypeptides (e.g., leucine zippers, GCN4 zippers).

[0394] As used herein, “Fc” or “Fc region” or “Fe domain” refers to a polypeptide containing the constant region of an antibody heavy chain, excluding the first constant region immunoglobulin domain. Thus, Fc refers to the last two constant region immunoglobulin domains of IgA, IgD, and IgE, or the last three constant region immunoglobulin domains of IgE and IgM. Optionally, an Fc domain can include all or part of the flexible hinge N-terminal to these domains. For IgA and IgM, Fc can include the J chain. For an exemplary Fc domain of IgG, Fc contains immunoglobulin domains Cγ2 and Cγ3, and optionally, all or part of the hinge between Cγ1 and Cγ2. The boundaries of the Fc region can vary, but typically, include at least part of the hinge region. In addition, Fc also includes any allelic or species variant or any variant or modified form, such as any variant or modified form that alters the binding to an FcR or alters an Fc-mediated effector function.

[0395] As used herein, “Fc chimera” refers to a chimeric polypeptide in which one or more polypeptides is linked, directly or indirectly, to an Fc region or a derivative thereof. Typically, an Fc chimera combines the Fc region of an immunoglobulin with another polypeptide. Derivatives of or modified Fc polypeptides are known to those of skill in the art.

[0396] As used herein, a chimeric polypeptide refers to a polypeptide that contains portions from at least two different polypeptides or from two non-contiguous portions of a single polypeptide. Thus, a chimeric polypeptide generally includes a sequence of amino acid residues from all or part of one polypeptide and a sequence of amino acids from all or part of another different polypeptide. The two portions can be linked directly or indirectly and can be linked via peptide bonds, other covalent bonds or other non-covalent interactions of sufficient strength to maintain the integrity of a substantial portion of the chimeric polypeptide under equilibrium conditions and physiologic conditions, such as in isotonic pH 7 buffered saline.

[0397] As used herein, a fusion protein is a polypeptide engineered to contain sequences of amino acids corresponding to two distinct polypeptides, which are joined together, such as by expressing the fusion protein from a vector containing two nucleic acids, encoding the two polypeptides, in close proximity, e.g., adjacent, to one another along the length of the vector. Accordingly, a fusion protein refers to a chimeric protein containing two, or portions from two, or more proteins or peptides that are linked directly or indirectly via peptide bonds. The two molecules can be adjacent in the construct or separated by a linker, or spacer polypeptide.

[0398] As used herein, “linker” or “spacer” peptide refers to short sequences of amino acids that join two polypeptide sequences (or nucleic acid encoding such an amino acid sequence). “Peptide linker” refers to the short sequence of amino acids joining the two polypeptide sequences. Exemplary of polypeptide linkers are linkers joining a peptide transduction domain to an antibody or linkers joining two antibody chains in a synthetic antibody fragment such as an scFv fragment. Linkers are well-known and any known linkers can be used in the provided methods. Exemplary polypeptide linkers include (Gly-Ser)ₙ amino acid sequences, with some Glu or Lys residues dispersed throughout to increase solubility. Other exemplary linkers are described herein; any of these and other known linkers can be used with the provided compositions and methods.

[0399] As used herein, a “tag” or an “epitope tag” refers to a sequence of amino acids, typically added to the N- or C-terminus of a polypeptide, such as an antibody provided herein. The inclusion of tags fused to a polypeptide can facilitate polypeptide purification and/or detection. Typically, a tag or tag polypeptide refers to a polypeptide that has enough residues to provide an epitope recognized by an antibody or can serve for detection or purification, yet is short enough such that it does not interfere with activity of the polypeptide to which it is linked. The tag polypeptide typically is sufficiently unique so that an antibody that specifically binds thereto does not substantially cross-react with epitopes in the polypeptide to which it is linked.

[0400] Suitable tag polypeptides generally have at least 5 or 6 amino acid residues and usually between about 8-50 amino acid residues, typically between 9-30 residues. The tags can be linked to one or more chimeric polypeptides in a multimer and permit detection of the multimer or its recovery from a sample or mixture. Such tags are well-known and can be readily synthesized and designed. Exemplary tag polypeptides include those used for affinity purification and include, FLAG tags, His tags, the influenza hemagglutinin (HA) tag polypeptide and its antibody 12CA5, (Field et al. (1988) Mol. Cell. Biol. 8:2159-2165); the c-myc tag and the 8F9, 3C7, 6E10, G4, B7 and 9E10 antibodies thereto (see, e.g., Evan et al. (1985) Molecular and Cellular Biology 5:3610-3616); and the Herpes Simplex virus glycoprotein D (gD) tag and its antibody (Paborsky et al. (1990) Protein Engineering 3:547-553). An antibody used to detect an epitope-tagged antibody is typically referred to herein as a secondary antibody.

[0401] As used herein, a label or detectable moiety is a detectable marker (e.g., a fluorescent molecule, chemiluminescent molecule, a bioluminescent molecule, a contrast agent (e.g., a metal), a radionuclide, a chromophore, a detectable peptide, or an enzyme that catalyzes the formation of a detectable product) that can be attached or linked directly or indirectly to a molecule (e.g., an antibody or antigen-binding fragment thereof, such as an anti-EGFR antibody or antigen-binding fragment thereof provided herein) or associated therewith and can be detected in vivo and/or in vitro. The detection method can be any method known in the art, including known in vivo and/or in vitro methods of detection (e.g., imaging by visual inspection, magnetic resonance (MR) spectroscopy, ultrasound signal, X-ray, gamma ray spectroscopy (e.g., positron emission tomography (PET) scanning, single-photon emission computed tomography (SPECT)), fluorescence spectroscopy or absorption). Indirect detection refers to measurement of a physical phenomenon, such as energy or particle emission or absorption, of an atom, molecule or composition that binds directly or indirectly to the detectable moiety (e.g., detection of a labeled secondary antibody or antigen-binding fragment thereof that binds to a primary antibody (e.g., an anti-EGFR antibody or antigen-binding fragment thereof provided herein).

[0402] As used herein, “nucleic acid” refers to at least two linked nucleotides or nucleotide derivatives, including a deoxyribonucleic acid (DNA) and a ribonucleic acid (RNA), joined together, typically by phosphodiester linkages. Also included in the term “nucleic acid” are analogs of nucleic acids such as peptide nucleic acid (PNA), phosphorothioate DNA, and other such analogs and derivatives or combinations thereof. Nucleic acids also include DNA and RNA derivatives containing, for example, a nucleotide analog or a “backbone” bond other than a phosphodiester bond, for example, a phosphotriester bond, a phosphoramidate bond, a phosphorothioate bond, a thioester bond, or a peptide bond (peptide nucleic acid). The term also includes, as equivalents, derivatives, variants and analogs of either RNA or DNA made from nucleotide analogs, single (sense or antisense) and double-stranded nucleic acids. Deoxyribonucleotides include deoxyadenosine, deoxycytidine, deoxyguanosine and deoxythymidine. For RNA, the uracil base is uridine.

[0403] As used herein, an isolated nucleic acid molecule is one which is separated from other nucleic acid molecules which are present in the natural source of the nucleic acid molecule. An “isolated” nucleic acid molecule, such as a cDNA molecule, can be substantially free of other cellular material, or culture medium when produced by recombinant techniques, or substantially free of chemical precursors or other chemicals when chemically synthesized. Exemplary isolated nucleic acid molecules provided herein include isolated nucleic acid molecules encoding an antibody or antigen-binding fragments provided.

[0404] As used herein, “operably linked” with reference to nucleic acid sequences, regions, elements or domains means that the nucleic acid regions are functionally related to each other. For example, nucleic acid encoding a leader peptide can be operably linked to nucleic acid encoding a polypeptide, whereby the nucleic acids can be transcribed and translated to express a functional fusion protein, wherein the leader peptide effects secretion of the fusion polypeptide. In some instances, the nucleic acid encoding a first polypeptide (e.g., a leader peptide) is operably linked to nucleic acid encoding a second polypeptide and the nucleic acids are transcribed as a single mRNA transcript, but translation of the mRNA transcript can result in one of two polypeptides being expressed. For example, an amber stop codon can be located between the nucleic acid encoding the first polypeptide and the nucleic acid encoding the second polypeptide, such that, when introduced into a partial amber suppressor cell, the resulting single mRNA transcript can be translated to produce either a fusion protein containing the first and second polypeptides, or can be translated to produce only the first polypeptide. In another example, a promoter can be operably linked to nucleic acid encoding a polypeptide, whereby the promoter regulates or mediates the transcription of the nucleic acid.

[0405] As used herein, “synthetic,” with reference to, for example, a synthetic nucleic acid molecule or a synthetic gene or a synthetic peptide refers to a nucleic acid molecule or polypeptide molecule that is produced by recombinant methods and/or by chemical synthesis methods.

[0406] As used herein, the residues of naturally occurring α-amino acids are the residues of those 20 α-amino acids found in nature which are incorporated into protein by the specific recognition of the charged tRNA molecule with its cognate mRNA codon in humans.

[0407] As used herein, “polypeptide” refers to two or more amino acids covalently joined. The terms “polypeptide” and “protein” are used interchangeably herein.

[0408] As used herein, a “peptide” refers to a polypeptide that is from 2 to about or 40 amino acids in length.

[0409] As used herein, an “amino acid” is an organic compound containing an amino group and a carboxylic acid group. A polypeptide contains two or more amino acids. For purposes herein, amino acids contained in the antibodies provided include the twenty naturally-occurring amino acids (Table 3), non-natural amino acids, and amino acid analogs (e.g., amino acids wherein the α-carbon has a side chain). As used herein, the amino acids, which occur in the various amino acid sequences of polypeptides appearing herein, are identified according to their well-known, three-letter or one-letter abbreviations (see Table 3). The nucleotides, which occur in the various nucleic acid molecules and fragments, are designated with the standard single-letter designations used routinely in the art.

[0410] As used herein, “amino acid residue” refers to an amino acid formed upon chemical digestion (hydrolysis) of a polypeptide at its peptide linkages. The amino acid residues described herein are generally in the “L” isomeric form. Residues in the “D” isomeric form can be substituted for any L-amino acid residue, as long as the desired functional property is retained by the polypeptide. NH₂ refers to the free amino group present at the amino terminus of a polypeptide. COOH refers to the free carboxy group present at the carboxyl terminus of a polypeptide. In keeping with standard polypeptide nomenclature described in J. Biol. Chem., 243:3557-59 (1968) and adopted at 37 C.F.R. §§1.821-1.822, abbreviations for amino acid residues are shown in Table 3:

TABLE 3
Table of Correspondence

SYMBOL

| 1-Letter | 3-Letter | AMINO ACID |
|---|---|---|
| Y | Tyr | Tyrosine |
| G | Gly | Glycine |
| F | Phe | Phenylalanine |
| M | Met | Methionine |
| A | Ala | Alanine |
| S | Ser | Serine |
| I | Ile | Isoleucine |
| L | Leu | Leucine |
| T | Thr | Threonine |
| V | Val | Valine |
| P | Pro | Proline |
| K | Lys | Lysine |
| H | His | Histidine |
| Q | Gln | Glutamine |
| E | Glu | Glutamic acid |
| Z | Glx | Glutamic Acid and/or Glutamine |
| W | Trp | Tryptophan |
| R | Arg | Arginine |
| D | Asp | Aspartic acid |
| N | Asn | Asparagine |
| B | Asx | Aspartic Acid and/or Asparagine |
| C | Cys | Cysteine |
| X | Xaa | Unknown or other |

[0411] All sequences of amino acid residues represented herein by a formula have a left to right orientation in the conventional direction of amino-terminus to carboxyl-terminus. In addition, the phrase “amino acid residue” is defined to include the amino acids listed in the Table of Correspondence (Table 3), modified, non-natural and unusual amino acids. Furthermore, a dash at the beginning or end of an amino acid residue sequence indicates a peptide bond to a further sequence of one or more amino acid residues or to an amino-terminal group such as NH₂ or to a carboxyl-terminal group such as COOH.

[0412] In a peptide or protein, suitable conservative substitutions of amino acids are known to those of skill in the art and generally can be made without altering a biological activity of a resulting molecule. Those of skill in the art recognize that, in general, single amino acid substitutions in non-essential regions of a polypeptide do not substantially alter biological activity (see, e.g., Watson et al., Molecular Biology of the Gene, 4th Edition, 1987, The Benjamin/Cummings Pub. co., p. 224).

[0413] Such substitutions can be made in accordance with the exemplary substitutions set forth in Table 4 as follows:

TABLE 4
Exemplary conservative amino acid substitutions

| Original | Conservative |
|---|---|
| residue | substitution |
| Ala (A) | Gly; Ser |
| Arg (R) | Lys |
| Asn (N) | Gln; His |
| Cys (C) | Ser |
| Gln (Q) | Asn |
| Glu (E) | Asp |
| Gly (G) | Ala; Pro |
| His (H) | Asn; Gln |
| Ile (I) | Leu; Val |
| Leu (L) | Ile; Val |
| Lys (K) | Arg; Gln; Glu |
| Met (M) | Leu; Tyr; Ile |
| Phe (F) | Met; Leu; Tyr |
| Ser (S) | Thr |
| Thr (T) | Ser |
| Trp (W) | Tyr |
| Tyr (Y) | Trp; Phe |
| Val (V) | Ile; Leu |

[0414] Other substitutions also are permissible and can be determined empirically or in accord with other known conservative or non-conservative substitutions.

[0415] As used herein, “naturally occurring amino acids” refer to the 20 L-amino acids that occur in polypeptides.

[0416] As used herein, the term “non-natural amino acid” refers to an organic compound that has a structure similar to a natural amino acid but has been modified structurally to mimic the structure and reactivity of a natural amino acid. Non-naturally occurring amino acids thus include, for example, amino acids or analogs of amino acids other than the 20 naturally occurring amino acids and include, but are not limited to, the D-stereoisomers of amino acids. Exemplary non-natural amino acids are known to those of skill in the art, and include, but are not limited to, 2-Aminoadipic acid (Aad), 3-Aminoadipic acid (bAad), β-alanine/β-Amino-propionic acid (Bala), 2-Aminobutyric acid (Abu), 4-Aminobutyric acid/piperidinic acid (4Abu), 6-Aminocaproic acid (Acp), 2-Aminoheptanoic acid (Ahe), 2-Aminoisobutyric acid (Aib), 3-Aminoisobutyric acid (Baib), 2-Aminopimelic acid (Apm), 2,4-Diaminobutyric acid (Dbu), Desmosine (Des), 2,2′-Diaminopimelic acid (Dpm), 2,3-Diaminopropionic acid (Dpr), N-Ethylglycine (EtGly), N-Ethylasparagine (EtAsn), Hydroxylysine (Hyl), allo-Hydroxylysine (Ahyl), 3-Hydroxyproline (3Hyp), 4-Hydroxyproline (4Hyp), Isodesmosine (Ide), allo-Isoleucine (Aile), N-Methylglycine, sarcosine (MeGly), N-Methylisoleucine (MeIle), 6-N-Methyllysine (MeLys), N-Methylvaline (MeVal), Norvaline (Nva), Norleucine (Nle), and Ornithine (Orn).

[0417] As used herein, a DNA construct is a single or double stranded, linear or circular DNA molecule that contains segments of DNA combined and juxtaposed in a manner not found in nature. DNA constructs exist as a result of human manipulation, and include clones and other copies of manipulated molecules.

[0418] As used herein, a DNA segment is a portion of a larger DNA molecule having specified attributes. For example, a DNA segment encoding a specified polypeptide is a portion of a longer DNA molecule, such as a plasmid or plasmid fragment, which, when read from the 5′ to 3′ direction, encodes the sequence of amino acids of the specified polypeptide.

[0419] As used herein, the term polynucleotide means a single- or double-stranded polymer of deoxyribonucleotides or ribonucleotide bases read from the 5′ to the 3′ end. Polynucleotides include RNA and DNA, and can be isolated from natural sources, synthesized in vitro, or prepared from a combination of natural and synthetic molecules. The length of a polynucleotide molecule is given herein in terms of nucleotides (abbreviated “nt”) or base pairs (abbreviated “bp”). The term nucleotides is used for single- and double-stranded molecules where the context permits. When the term is applied to double-stranded molecules it is used to denote overall length and will be understood to be equivalent to the term base pairs. It will be recognized by those skilled in the art that the two strands of a double-stranded polynucleotide can differ slightly in length and that the ends thereof can be staggered; thus all nucleotides within a double-stranded polynucleotide molecule cannot be paired. Such unpaired ends will, in general, not exceed 20 nucleotides in length.

[0420] As used herein, production by recombinant means by using recombinant DNA methods means the use of the well-known methods of molecular biology for expressing proteins encoded by cloned DNA.

[0421] As used herein, “expression” refers to the process by which polypeptides are produced by transcription and translation of polynucleotides. The level of expression of a polypeptide can be assessed using any method known in art, including, for example, methods of determining the amount of the polypeptide produced from the host cell. Such methods can include, but are not limited to, quantitation of the polypeptide in the cell lysate by ELISA, Coomassie blue staining following gel electrophoresis, Lowry protein assay and Bradford protein assay.

[0422] As used herein, a “host cell” is a cell that is used to receive, maintain, reproduce and/or amplify a vector. A host cell also can be used to express the polypeptide encoded by the vector. The nucleic acid contained in the vector is replicated when the host cell divides, thereby amplifying the nucleic acids.

[0423] As used herein, a “vector” is a replicable nucleic acid from which one or more heterologous proteins, can be expressed when the vector is transformed into an appropriate host cell. Reference to a vector includes those vectors into which a nucleic acid encoding a polypeptide or fragment thereof can be introduced, typically by restriction digest and ligation. Reference to a vector also includes those vectors that contain nucleic acid encoding a polypeptide, such as a modified anti-EGFR antibody. The vector is used to introduce the nucleic acid encoding the polypeptide into the host cell for amplification of the nucleic acid or for expression/display of the polypeptide encoded by the nucleic acid. The vectors typically remain episomal, but can be designed to effect integration of a gene or portion thereof into a chromosome of the genome. Also contemplated are vectors that are artificial chromosomes, such as yeast artificial chromosomes and mammalian artificial chromosomes. Selection and use of such vehicles are well-known to those of skill in the art. A vector also includes “virus vectors” or “viral vectors.” Viral vectors are engineered viruses that are operatively linked to exogenous genes to transfer (as vehicles or shuttles) the exogenous genes into cells.

[0424] As used herein, an “expression vector” includes vectors capable of expressing DNA that is operatively linked with regulatory sequences, such as promoter regions, that are capable of effecting expression of such DNA fragments. Such additional segments can include promoter and terminator sequences, and optionally can include one or more origins of replication, one or more selectable markers, an enhancer, a polyadenylation signal, and the like. Expression vectors are generally derived from plasmid or viral DNA, or can contain elements of both. Thus, an expression vector refers to a recombinant DNA or RNA construct, such as a plasmid, a phage, recombinant virus or other vector that, upon introduction into an appropriate host cell, results in expression of the cloned DNA. Appropriate expression vectors are well-known to those of skill in the art and include those that are replicable in eukaryotic cells and/or prokaryotic cells and those that remain episomal or those which integrate into the host cell genome.

[0425] As used herein, “primary sequence” refers to the sequence of amino acid residues in a polypeptide or the sequence of nucleotides in a nucleic acid molecule.

[0426] As used herein, “sequence identity” refers to the number of identical or similar amino acids or nucleotide bases in a comparison between a test and a reference polypeptide or polynucleotide. Sequence identity can be determined by sequence alignment of nucleic acid or protein sequences to identify regions of similarity or identity. For purposes herein, sequence identity is generally determined by alignment to identify identical residues. The alignment can be local or global. Matches, mismatches and gaps can be identified between compared sequences. Gaps are null amino acids or nucleotides inserted between the residues of aligned sequences so that identical or similar characters are aligned. Generally, there can be internal and terminal gaps. When using gap penalties, sequence identity can be determined with no penalty for end gaps (e.g., terminal gaps are not penalized). Alternatively, sequence identity can be determined without taking into account gaps as the number of identical positions/length of the total aligned sequence×100.

[0427] As used herein, a “global alignment” is an alignment that aligns two sequences from beginning to end, aligning each letter in each sequence only once. An alignment is produced, regardless of whether or not there is similarity or identity between the sequences. For example, 50% sequence identity based on “global alignment” means that in an alignment of the full sequence of two compared sequences each of 100 nucleotides in length, 50% of the residues are the same. It is understood that global alignment also can be used in determining sequence identity even when the length of the aligned sequences is not the same. The differences in the terminal ends of the sequences will be taken into account in determining sequence identity, unless the “no penalty for end gaps” is selected. Generally, a global alignment is used on sequences that share significant similarity over most of their length. Exemplary algorithms for performing global alignment include the Needleman-Wunsch algorithm (Needleman et al. J. Mol. Biol. 48: 443 (1970). Exemplary programs for performing global alignment are publicly available and include the Global Sequence Alignment Tool available at the National Center for Biotechnology Information (NCBI) website (ncbi.nlm.nih.gov/), and the program available at deepc2.psi.iastate.edu/aat/align/align.html.

[0428] As used herein, a “local alignment” is an alignment that aligns two sequence, but only aligns those portions of the sequences that share similarity or identity. Hence, a local alignment determines if sub-segments of one sequence are present in another sequence. If there is no similarity, no alignment will be returned. Local alignment algorithms include BLAST or Smith-Waterman algorithm (Adv. Appl. Math. 2: 482 (1981)). For example, 50% sequence identity based on “local alignment” means that in an alignment of the full sequence of two compared sequences of any length, a region of similarity or identity of 100 nucleotides in length has 50% of the residues that are the same in the region of similarity or identity.

[0429] For purposes herein, sequence identity can be determined by standard alignment algorithm programs used with default gap penalties established by each supplier. Default parameters for the GAP program can include: (1) a unary comparison matrix (containing a value of 1 for identities and 0 for non-identities) and the weighted comparison matrix of Gribskov et al. Nucl. Acids Res. 14: 6745 (1986), as described by Schwartz and Dayhoff, eds., Atlas of Protein Sequence and Structure, National Biomedical Research Foundation, pp. 353-358 (1979); (2) a penalty of 3.0 for each gap and an additional 0.10 penalty for each symbol in each gap; and (3) no penalty for end gaps. Whether any two nucleic acid molecules have nucleotide sequences or any two polypeptides have amino acid sequences that are at least 80%, 85%, 90%, 95%, 96%, 97%, 98% or 99% “identical,” or other similar variations reciting a percent identity, can be determined using known computer algorithms based on local or global alignment (see e.g., wikipedia.org/wiki/Sequence_alignment_software, providing links to dozens of known and publicly available alignment databases and programs). Generally, for purposes herein sequence identity is determined using computer algorithms based on global alignment, such as the Needleman-Wunsch Global Sequence Alignment tool available from NCBI/BLAST (blast.ncbi.nlm.nih.gov/Blast.cgi?CMD=Web&Page_TYPE=BlastHome); LAlign (William Pearson implementing the Huang and Miller algorithm (Adv. Appl. Math. (1991) 12:337-357)); and program from Xiaoqui Huang available at deepc2.psi.iastate.edu/aat/align/align.html. Typically, the full-length sequence of each of the compared polypeptides or nucleotides is aligned across the full-length of each sequence in a global alignment. Local alignment also can be used when the sequences being compared are substantially the same length.

[0430] Therefore, as used herein, the term “identity” represents a comparison or alignment between a test and a reference polypeptide or polynucleotide. In one non-limiting example, “at least 90% identical to” refers to percent identities from 90 to 100% relative to the reference polypeptide or polynucleotide. Identity at a level of 90% or more is indicative of the fact that, assuming for exemplification purposes a test and reference polypeptide or polynucleotide length of 100 amino acids or nucleotides are compared, no more than 10% (i.e., 10 out of 100) of amino acids or nucleotides in the test polypeptide or polynucleotide differ from those of the reference polypeptide. Similar comparisons can be made between a test and reference polynucleotides. Such differences can be represented as point mutations randomly distributed over the entire length of an amino acid sequence or they can be clustered in one or more locations of varying length up to the maximum allowable, e.g., 10/100 amino acid difference (approximately 90% identity). Differences also can be due to deletions or truncations of amino acid residues. Differences are defined as nucleic acid or amino acid substitutions, insertions or deletions. Depending on the length of the compared sequences, at the level of homologies or identities above about 85-90%, the result can be independent of the program and gap parameters set; such high levels of identity can be assessed readily, often without relying on software.

[0431] As used herein, a disulfide bond (also called an S—S bond or a disulfide bridge) is a single covalent bond derived from the coupling of thiol groups. Disulfide bonds in proteins are formed between the thiol groups of cysteine residues, and stabilize interactions between polypeptide domains, such as antibody domains.

[0432] As used herein, “coupled” or “conjugated” means attached via a covalent or noncovalent interaction.

[0433] As used herein, the phrase “conjugated to an antibody” or “linked to an antibody” or grammatical variations thereof, when referring to the attachment of a moiety to an antibody or antigen-binding fragment thereof, such as a diagnostic or therapeutic moiety, means that the moiety is attached to the antibody or antigen-binding fragment thereof by any known means for linking peptides, such as, for example, by production of fusion protein by recombinant means or post-translationally by chemical means. Conjugation can employ any of a variety of linking agents to effect conjugation, including, but not limited to, peptide or compound linkers or chemical cross-linking agents.

[0434] As used herein “auristatin drug moiety” refers to the substructure of an antibody-drug-conjugate that has the structure of an aurastin derivative. Aurastins are a class of synthetic molecules that interfere with microtubule dynmaics, GTP hydrolysis and nuclear and cellular division. Exemplary auristatin embodiments include N-terminally and C-terminally linked monomethylauristatin drug moieties MMAE and MMAF (Senter et al. (2004) “Proceedings of the American Association for Cancer Research,” Volume 45, Abstract Number 623, and presented Mar. 28, 2004; U.S. Publication No. 2011/0020343). The synthesis and structure of exemplary auristatin derivatives are described in U.S. Patent Application Publication Nos. 2003-0083263, 2005-0238649 and 2005-0009751; International Patent Publication No. WO 04/010957, International Patent Publication No. WO 02/088172, and U.S. Pat. Nos. 6,323,315; 6,239,104; 6,034,065; 5,780,588; 5,665,860; 5,663,149; 5,635,483; 5,599,902; 5,554,725; 5,530,097; 5,521,284; 5,504,191; 5,410,024; 5,138,036; 5,076,973; 4,986,988; 4,978,744; 4,879,278; 4,816,444; and 4,486,414, each of which is incorporated by reference herein in its entirety.

[0435] As used herein, “Maytansinoid drug moiety” means the substructure of an antibody-drug conjugate that has the structure of a maytansine compound. Maytansine was first isolated from the east African shrub Maytenus serrata (U.S. Pat. No. 3,896,111). Subsequently, it was discovered that certain microbes also produce maytansinoids, such as maytansinol and C-3 maytansinol esters (U.S. Pat. No. 4,151,042). Synthetic maytansinol and maytansinol analogs have been reported. See U.S. Pat. Nos. 4,137,230; 4,248,870; 4,256,746; 4,260,608; 4,265,814; 4,294,757; 4,307,016; 4,308,268; 4,308,269; 4,309,428; 4,313,946; 4,315,929; 4,317,821; 4,322,348; 4,331,598; 4,361,650; 4,364,866; 4,424,219; 4,450,234; 4,362,663; and 4,371,533, and Kawai et al (1984) Chem. Pharm. Bull. 3341-3351).

[0436] A “free cysteine amino acid” refers to a cysteine amino acid residue that has a thiol functional group (—SH), and is not paired as an intramolecular or intermolecular disulfide bridge. It can be engineered into a parent antibody.

[0437] As used herein, “Linker”, “Linker Unit”, or “link” means a peptide or chemical moiety containing a chain of atoms that covalently attaches an antibody to a drug moiety or therapeutic moiety.

[0438] As used herein, “Antibody-dependent cell-mediated cytotoxicity” and “ADCC” refer to a cell-mediated reaction in which nonspecific cytotoxic cells that express Fc receptors (FcRs) (e.g., Natural Killer (NK) cells, neutrophils, and macrophages) recognize bound antibody on a target cell and subsequently cause lysis of the target cell. The primary cells for mediating ADCC, NK cells, express FcγRIII only, whereas monocytes express FcγRI, FcγRII and FcγRIII. FcR expression on hematopoietic cells is summarized in Table 3 on page 464 of Ravetch and Kinet, (1991) Annu. Rev. Immunol, 9:457-92. To assess ADCC activity of a molecule of interest, an in vitro ADCC assay may be performed (U.S. Pat. No. 5,500,362; U.S. Pat. No. 5,821,337). Useful effector cells for such assays include peripheral blood mononuclear cells (PBMC) and Natural Killer (NK) cells. Alternatively, or additionally, ADCC activity of the molecule of interest may be assessed in vivo, e.g., in an animal model such as that disclosed in Clynes et al (1998) PNAS (USA), 95:652-656.

[0439] As used herein “therapeutic activity” refers to the in vivo activity of a therapeutic polypeptide. Generally, the therapeutic activity is the activity that is associated with treatment of a disease or condition. For example, the therapeutic activity of an anti-EGFR antibody includes inhibitory activities on EGFR phosphorylation, signaling and cell growth, and in particular inhibitory activities on tumor cell growth. Therapeutic activity of a modified polypeptide can be any level of percentage of therapeutic activity of the unmodified polypeptide, including but not limited to, 1% of the activity, 2%, 3%, 4%, 5%, 10%, 20%, 30%, 40%, 50%, 60%, 70%, 80%, 90%, 91%, 92%, 93%, 94%, 95%, 96%, 97%, 98%, 99%, 100%, 200%, 300%, 400%, 500%, or more of therapeutic activity compared to the unmodified polypeptide.

[0440] As used herein, the term “assessing” is intended to include quantitative and qualitative determination in the sense of obtaining an absolute value for the activity of a protein, such as a modified anti-EGFR antibody, or an antigen binding fragment thereof, present in the sample, and also of obtaining an index, ratio, percentage, visual, or other value indicative of the level of the activity. Assessment can be direct or indirect.

[0441] As used herein, “disease or disorder” refers to a pathological condition in an organism resulting from cause or condition including, but not limited to, infections, acquired conditions, genetic conditions, and characterized by identifiable symptoms.

[0442] As used herein, “EGFR-associated disease or condition” or “conditions responsive to treatment with an anti-EGFR antibody,” refers to any disease or condition that is associated with or caused by aberrant EGFR signaling or overexpression of EGFR. Such diseases and conditions are known in the art, and examples of such are described herein. For example, EGFR-associated diseases or conditions or conditions responsive to treatment with an anti-EGFR antibody include cancers, such as, but not limited to, colorectal cancer, squamous cell cancer of the head and neck and non-small-cell lung cancer.

[0443] As used herein, “treating” a subject with a disease or condition means that the subject's symptoms are partially or totally alleviated, or remain static following treatment. Hence treatment encompasses prophylaxis, therapy and/or cure. Prophylaxis refers to prevention of a potential disease and/or a prevention of worsening of symptoms or progression of a disease. Treatment also encompasses any pharmaceutical use of any antibody or antigen-binding fragment thereof provided or compositions provided herein.

[0444] As used herein, “prevention” or prophylaxis, and grammatically equivalent forms thereof, refers to methods in which the risk of developing disease or condition is reduced.

[0445] As used herein, a “pharmaceutically effective agent” includes any therapeutic agent or bioactive agents, including, but not limited to, for example, anesthetics, vasoconstrictors, dispersing agents, conventional therapeutic drugs, including small molecule drugs and therapeutic proteins.

[0446] As used herein, a “therapeutic effect” means an effect resulting from treatment of a subject that alters, typically improves or ameliorates the symptoms of a disease or condition or that cures a disease or condition.

[0447] As used herein, a “therapeutically effective amount” or a “therapeutically effective dose” refers to the quantity of an agent, compound, material, or composition containing a compound that is at least sufficient to produce a therapeutic effect following administration to a subject. Hence, it is the quantity necessary for preventing, curing, ameliorating, arresting or partially arresting a symptom of a disease or disorder.

[0448] As used herein, “therapeutic efficacy” refers to the ability of an agent, compound, material, or composition containing a compound to produce a therapeutic effect in a subject to whom the an agent, compound, material, or composition containing a compound has been administered.

[0449] As used herein, a “prophylactically effective amount” or a “prophylactically effective dose” refers to the quantity of an agent, compound, material, or composition containing a compound that when administered to a subject, will have the intended prophylactic effect, e.g., preventing or delaying the onset, or reoccurrence, of disease or symptoms, reducing the likelihood of the onset, or reoccurrence, of disease or symptoms, or reducing the incidence of viral infection. The full prophylactic effect does not necessarily occur by administration of one dose, and can occur only after administration of a series of doses. Thus, a prophylactically effective amount can be administered in one or more administrations.

[0450] As used herein, amelioration of the symptoms of a particular disease or disorder by a treatment, such as by administration of a pharmaceutical composition or other therapeutic, refers to any lessening, whether permanent or temporary, lasting or transient, of the symptoms that can be attributed to or associated with administration of the composition or therapeutic.

[0451] As used herein, “Prodrug” is a precursor or derivative form of a pharmaceutically active substance that is less cytotoxic to tumor cells compared to the parent drug and is capable of being enzymatically activated or converted into the more active parent form(see, e.g., Wilman, 1986, Biochemical Society Transactions, 615th Meeting Belfast, 14:375-382; and Stella et al., “Prodrugs: A Chemical Approach to Targeted Drug Delivery,” Directed Drug Delivery, Borchardt et al., (ed.): 247-267, Humana Press, 1985.)

[0452] As used herein, an “anti-cancer agent” refers to any agent that is destructive or toxic to malignant cells and tissues. For example, anti-cancer agents include agents that kill cancer cells or otherwise inhibit or impair the growth of tumors or cancer cells. Exemplary anti-cancer agents are chemotherapeutic agents.

[0453] As used herein, an “anti-angiogenic agent” or “angiogenesis inhibitor” is a compound that blocks, or interferes with, the development of blood vessels.

[0454] As used herein, a “hyperproliferative disease” is a condition caused by excessive growth of non-cancer cells that express a member of the EGFR family of receptors.

[0455] As used herein, the term “subject” refers to an animal, including a mammal, such as a human being.

[0456] As used herein, a patient refers to a human subject.

[0457] As used herein, animal includes any animal, such as, but are not limited to primates including humans, gorillas and monkeys; rodents, such as mice and rats; fowl, such as chickens; ruminants, such as goats, cows, deer, sheep; pigs and other animals. Non-human animals exclude humans as the contemplated animal. The polypeptides provided herein are from any source, animal, plant, prokaryotic and fungal. Most polypeptides are of animal origin, including mammalian origin.

[0458] As used herein, a “composition” refers to any mixture. It can be a solution, suspension, liquid, powder, paste, aqueous, non-aqueous or any combination thereof

[0459] As used herein, a stabilizing agent refers to compound added to the formulation to protect either the antibody or conjugate, such as under the conditions (e.g. temperature) at which the formulations herein are stored or used. Thus, included are agents that prevent proteins from degradation from other components in the compositions. Exemplary of such agents are amino acids, amino acid derivatives, amines, sugars, polyols, salts and buffers, surfactants, inhibitors or substrates and other agents as described herein.

[0460] As used herein, a “combination” refers to any association between or among two or more items. The combination can be two or more separate items, such as two compositions or two collections, a mixture thereof, such as a single mixture of the two or more items, or any variation thereof. The elements of a combination are generally functionally associated or related.

[0461] As used herein, combination therapy refers to administration of two or more different therapeutics, such as an anti-EGFR antibody (or antigen binding fragment thereof) and one or more therapeutics. The different therapeutic agents can be provided and administered separately, sequentially, intermittently, or can be provided in a single composition.

[0462] As used herein, a kit is a packaged combination that optionally includes other elements, such as additional reagents and instructions for use of the combination or elements thereof, for a purpose including, but not limited to, activation, administration, diagnosis, and assessment of a biological activity or property.

[0463] As used herein, a “unit dose form” refers to physically discrete units suitable for human and animal subjects and packaged individually as is known in the art.

[0464] As used herein, a “single dosage formulation” refers to a formulation for direct administration.

[0465] As used herein, a multi-dose formulation refers to a formulation that contains multiple doses of a therapeutic agent and that can be directly administered to provide several single doses of the therapeutic agent. The doses can be administered over the course of minutes, hours, weeks, days or months. Multidose formulations can allow dose adjustment, dose-pooling and/or dose-splitting. Because multi-dose formulations are used over time, they generally contain one or more preservatives to prevent microbial growth.

[0466] As used herein, an “article of manufacture” is a product that is made and sold. As used throughout this application, the term is intended to encompass any of the compositions provided herein contained in articles of packaging.

[0467] As used herein, a “fluid” refers to any composition that can flow. Fluids thus encompass compositions that are in the form of semi-solids, pastes, solutions, aqueous mixtures, gels, lotions, creams and other such compositions.

[0468] As used herein, an isolated or purified polypeptide or protein (e.g., an isolated antibody or antigen-binding fragment thereof) or biologically-active portion thereof (e.g., an isolated antigen-binding fragment) is substantially free of cellular material or other contaminating proteins from the cell or tissue from which the protein is derived, or substantially free from chemical precursors or other chemicals when chemically synthesized. Preparations can be determined to be substantially free if they appear free of readily detectable impurities as determined by standard methods of analysis, such as thin layer chromatography (TLC), gel electrophoresis and high performance liquid chromatography (HPLC), used by those of skill in the art to assess such purity, or sufficiently pure such that further purification does not detectably alter the physical and chemical properties, such as enzymatic and biological activities, of the substance. Methods for purification of the compounds to produce substantially chemically pure compounds are known to those of skill in the art. A substantially chemically pure compound, however, can be a mixture of stereoisomers. In such instances, further purification might increase the specific activity of the compound. As used herein, a “cellular extract” or “lysate” refers to a preparation or fraction which is made from a lysed or disrupted cell.

[0469] As used herein, a “control” refers to a sample that is substantially identical to the test sample, except that it is not treated with a test parameter, or, if it is a plasma sample, it can be from a normal volunteer not affected with the condition of interest. A control also can be an internal control.

[0470] As used herein, the singular forms “a,” “an” and “the” include plural referents unless the context clearly dictates otherwise. Thus, for example, reference to a polypeptide, comprising “an immunoglobulin domain” includes polypeptides with one or a plurality of immunoglobulin domains.

[0471] As used herein, the term “or” is used to mean “and/or” unless explicitly indicated to refer to alternatives only or the alternatives are mutually exclusive.

[0472] As used herein, ranges and amounts can be expressed as “about” a particular value or range. About also includes the exact amount. Hence “about 5 amino acids” means “about 5 amino acids” and also “5 amino acids.”

[0473] As used herein, “optional” or “optionally” means that the subsequently described event or circumstance does or does not occur and that the description includes instances where said event or circumstance occurs and instances where it does not. For example, an optionally variant portion means that the portion is variant or non-variant.

[0474] As used herein, the abbreviations for any protective groups, amino acids and other compounds, are, unless indicated otherwise, in accord with their common usage, recognized abbreviations, or the IUPAC-IUB Commission on Biochemical Nomenclature (see, Biochem. (1972) 11(9):1726-1732).

[0475] For clarity of disclosure, and not by way of limitation, the detailed description is divided into the subsections that follow.

### B. EGFR AND ANTI-EGFR ANTIBODIES

[0476] Provided herein are anti-epidermal growth factor receptor (EGFR) antibodies that exhibit greater binding activity under acidic pH conditions and/or elevated lactate levels (e.g., present in a tumor microenvironment) than under neutral pH conditions/normal lactate levels (e.g., present in skin dermis). Anti-EGFR antibodies are known and approved for various indications, including metastatic colorectal cancer (mCRC), squamous cell carcinoma of the head and neck (SCCHN) and non-small cell lung cancer (NSCLC), pancreatic cancer, breast cancer, gastric cancer, ovarian cancer, rectal cancer, bladder cancer, and other solid tumors. Anti-EGFR antibodies include, but are not limited to, Erbitux® (cetuximab, C225 or IMC-C225), 11F8 by Zhu (WO 2005/090407), EMD 72000 (matuzumab), Vectibix™ (panitumumab; ABX-EGF), TheraCIM (nimotuzumab), and Hu-Max-EGFR (zalutumumab). These antibodies, however, exhibit substantially similar binding activity for EGFR under varied pH conditions so that their activity is not tumor-specific, thereby resulting in unwanted activity at non-target sites such as the skin. Thus, when administered to subjects, these therapeutic antibodies result in adverse side effects to the subjects (Eng C. (2009) Nat. Rev. Clin. Oncol., 6:207-218). This has limited their use.

[0477] For example, anti-EGFR antibodies are associated with significant and characteristic adverse events including skin toxicities and digestive disturbances (including nausea, vomiting, diarrhea), that often lead to interruption of dosing and discontinuation of treatment. For example, EGFR, is highly expressed in pre-keratinocytes and basal cells of the skin. Blockade of EGFR signaling in the skin precursors by anti-EGFR antibodies leads to skin precursor growth inhibition, apoptosis and inflammation. This can result in skin toxicity, such as a rash and other skin lesions. In particular, existing anti-EGFR antibodies (e.g., cetuximab, panitumumab) exhibit high toxicity with up to 80% attributed to skin-related toxicity, including 25% that is Grade 3-4 (Cunningham et al. (2004) NEJM, 351:337). In particular, skin lesions can include rash with itchy erythematous follicular papules that can evolve into pustules.

[0478] As a therapeutic, the activity of anti-EGFR antibodies is principally targeted to the tumor environment, which exhibits an acidic pH and elevated lactate levels, e.g., between 10-15 mM lactate. In contrast, the dermis, which is where many side effects are localized, exhibits a neutral pH and normal lactate levels. It is found herein that side effects can be reduced by providing antibodies that exhibit increased activity at targeted disease tissue, such as the tumor, but decreased activity at non-disease tissues or organs, in particular tissue sites (e.g., basal layer of skin or dermis) associated with adverse events. The differences in conditions that characterize solid tumors, such as low pH and hypoxia, can be leveraged to provide antibodies that are more active in the diseased microenvironment of the tumor. Hence, provided herein are modified anti-EGFR antibodies that are conditionally active in the tumor microenvironment and exhibit altered activity or increased activity under conditions present in the tumor microenvironment compared to normal tissues. For example, the antibodies provided herein are more active at low pH and/or high lactate, than at neutral pH or low lactate. As a consequence of this altered activity, subjects treated with the antibodies have fewer and/or reduced side effects.

[0479] In particular, it is found that modified anti-EGFR antibodies containing an amino acid replacement in the variable heavy chain with a negatively charged amino acid (e.g., Asp or Glu) at a position corresponding to position 104 with reference to the variable heavy chain set forth in SEQ ID NO: 2 or 7 exhibit increased activity, for example binding activity, at lower or acidic pH, for example, pH 6.0 to 6.5, inclusive, such as the acidic pH environment of the tumor, than at neutral pH (e.g., pH 7.4). Modified anti-EGFR antibodies containing the amino acid replacement to Glu (E), however, are shown herein to exhibit substantially weaker or lower binding activity than antibodies containing the amino acid replacement Asp (D) at neutral pH (e.g., pH 7.4). This difference could be due to the presence of an extra —CH2 group that affects the acidity of the molecule. By virtue of the decreased binding at neutral pH, modified anti-EGFR antibodies provided herein containing an amino acid replacement in the variable heavy chain with the negatively charged amino acid Glu (E) at a position corresponding to position 104 with reference to the variable heavy chain set forth in SEQ ID NO: 2 or 7 (e.g., Y104E) exhibit improved acidic pH-binding selectivity, and thereby improved tumor-targeted selectivity where activity is desired. Such modified anti-EGFR antibodies also can exhibit increased activity, for example binding activity, at increased lactate concentrations, such as at concentrations between 15 and 20 mM lactate. For example, the anti-EGFR antibodies provided herein bind with increased activity, such as binding activity, at both reduced pH (e.g., acidic pH 6.0 to 6.5, inclusive) and elevated lactate levels (e.g., 15 mM to 20 mM lactate). The anti-EGFR antibodies provided herein exhibit altered activity such that they confer reduced or fewer side effects when administered.

[0480] 1. EGFR

[0481] Epidermal growth factor receptor (EGFR; also known as receptor tyrosine-protein kinase erbB-1, ErbB-1, HER1) (Uniprot Accession No. P00533; SEQ ID NO: 43) is a 170 kDa Type I glycoprotein. EGFR is a member of the ErbB family of receptor tyrosine kinases, which includes HER2/c-neu (ErbB-2), Her3 (ErbB-3) and Her4 (ErbB-4). EGFR exists on cell surfaces and contains three domains, including an extracellular ligand-binding domain, an intracellular tyrosine kinase domain and a transmembrane lipophilic segment. In addition to their presence on a tumor cells, epidermal growth factor receptors are ubiquitous, distributed randomly on the surface of normal cells, excluding hematopoietic cells and cells of epidermal origin.

[0482] EGFR is a tyrosine kinase growth factor receptor involved in signaling cascades important for cell growth, proliferation, survival and motility. EGFR activity is stimulated or activated by binding of endogenous ligands such as epidermal growth factor (EGF), as well as other endogenous EGF-like ligands including TGF-α, amphiregulin, heparin-binding EGF (HB-EGF) and betacellulin. Upon ligand binding, the ligand-EGFR complex undergoes dimerization and internalization into the cell. EGFR can homodimerize with other monomeric EGFR molecules, or alternatively, heterodimerize with another HER receptor, such as HER2, ErbB-3 or ErbB-4. EGFR dimerization leads to autophosphorylation of tyrosine residues in the cytoplasmic tail of EGFR and activates intrinsic intracellular protein-tyrosine kinase activity. The EGFR phosphotyrosine residues act as docking sites for downstream effectors such as adaptor molecules and enzymes leading to initiation of a variety of signal transduction pathways, including mitogen-activated protein kinase (MAPK), Akt/phosphatidylinositol-3-OH kinase (PI3K) and c-Jun N-terminal kinases (JNK), thereby regulating a variety of mitogenic mechanisms involved in DNA synthesis, cell proliferation, cell migration, cell survival and cell adhesion.

[0483] EGFR is important in regulating cell survival and apoptosis, angiogenesis, cell motility and metastasis (Herbst et al. (2001) Expert Opin. Biol. Ther. 1(4):719-732). EGFR activation is associated with significant upregulation of secretion of vascular endothelial growth factor, a stimulator of tumor angiogenesis (Petit at al. (1997) Am J Pathol 151:1523-1530). Aberrant EGFR signaling and EGFR overexpression have been observed in various cancers and are correlated with poor prognosis and elevated risk of invasive or metastatic disease (Herbst et al. (2001) Expert Opin. Biol. Ther. 1(4):719-732). For example, deregulation of EGFRs have been observed in a variety of solid human tumors, including glioma and colon, head and neck, pancreatic, non-small cell lung, breast, renal, ovarian, and bladder carcinomas (Herbst and Hong (2002) Seminars in Oncology 29(5) Suppl. 14: 18-30). As such, EGFR is an attractive target for anti-cancer therapeutics.

[0484] 2. Anti-EGFR Antibodies and Side Effects

[0485] Therapeutic agents that target and inhibit aberrant EGFR signaling include anti-EGFR antibodies. Anti-EGFR antibodies bind EGFR, thereby inhibiting the binding of ligands, such as EGF, to the extracellular ligand binding domain of EGF and preventing receptor dimerization, autophosphorylation, and resulting signal transduction events. Hence, anti-EGFR antibodies can be effective therapeutics by blocking EGFR-mediated cell signaling and cell growth. Anti-EGFR antibodies are known in the art and many are in clinical development or approved for treatment of cancer. Cetuximab, marketed by ImClone under the trade name Erbitux®, is described in U.S. Pat. Nos. 4,943,533 and 7,060,808, including humanized form. Panitumumab, marketed by Abgenix under the trade name Vectibix, is described in U.S. Pat. No. 6,235,883. Zalutumumab (HuMax-EGFr), developed by Genmab, is described in WO 02/100348 and WO 2004/056847. Cetuximab, Panitumumab, and Zalutumumab bind the same epitope on EGFR. Further monoclonal anti-EGFR antibodies include, but are not limited to, Nimotuzumab (TheraCIM hR3; U.S. Pat. No. 5,891,996 and U.S. Pat. No. 6,506,883); ICR62 (The Institute of Cancer Research; WO 95/20045); mAb806 (Ludwig Institute of Cancer Research; WO 02/092771); and Matuzumab (EMD72000, Merck-Serono; WO 02/66058, WO 92/15683).

[0486] Anti-EGFR antibodies, however, cannot distinguish between EGF receptors on the surface of cancer cells and normal cells, and general inhibition of EGFR signaling can result in adverse side effects. For example, EGFR is widely distributed throughout epithelial tissues, and treatments employing many EGFR inhibitors exhibit skin toxicity (Herbst and Hong (2002) Seminars in Oncology 29(5) Suppl. 14: 18-30). In human skin, EGFR is expressed in basal keratinocytes and can stimulate epidermal growth, inhibit differentiation, and accelerate wound healing (Lacouture and Melosky (2007) Skin Therapy Lett. 12, 1-5; Nanney et al. (1990) J. Invest. Dermatol 94(6):742-748; Lacouture, M. E. (2006) Nat Rev Cancer 6:803-812) Inhibition of EGFR function can impair growth and migration of keratinocytes, and result in inflammatory chemokine expression, resulting in rashes (Lacouture, M. E. (2006) Nat Rev Cancer 6:803-812). Increased apoptosis of keratinocytes upon treatment with EGFR inhibitors is correlated with onset of rash in subjects treated with the EGFR inhibitors (Lacouture, M. E. (2006) Nat Rev Cancer 6:803-812). Keratinocytes are located in the stratum basale, the deepest layer of the skin, which has a pH between 7.0 and 7.2. The blood vessels in the dermis provide nourishment and waste removal for the epidermis, thus making the epidermis, in particular the stratum basale, most susceptible to systemically circulated anti-EGFR therapies.

[0487] The most common side effects associated with anti-EGFR antibodies, such as cetuximab, are dermatologic reactions, which are seen in 45-100% of patients (Le and Perez-Soler (2009) Target Oncol 4:107-119). Common dermatologic reactions include, acneiform rash, papulopustular rash, hair growth abnormalities, dry and itchy skin and periungual inflammation with tenderness (Eng (2009) Nat Rev Clin Oncol 6:207-218; Monti et al. (2007) Int J Biol Markers 22:S53-S61; Saif and Kim (2007) Expert Opin Drug Saf 6:175-182). Additional dermatologic reactions include telangiectasia, hyperpigmentation, pruritus without rash, erythema and oral aphthae (Eng (2009) Nat Rev Clin Oncol 6:207-218). Cetuximab elicits an immune response in about 5-15% of patients, with some patients reporting severe anaphylactic reactions (Chung et al. (2008) N Engl J Med 358:1109-1117). These hypersensitivity reactions have been linked to galactose-alpha-1,3-galactose oligosaccharides on cetuximab that induce the production of IgG antibodies (Chung et al. (2008) N Engl J Med 358:1109-1117). Further side effects include pulmonary toxicities, including dyspnea, cough, wheezing, pneumonia, hypoxemia, respiratory insufficiency/failure, pulmonary embolus, pleural effusion and non-specific respiratory disorders (Hoag et al. (2009) J Experimental & Clinical Cancer Research 28:113). Other side effects include fever, chills, asthenia/malaise, mucosal surface problems, nausea, gastrointestinal problems, abdominal pain, headache and hypomagnesemia (Eng (2009) Nat Rev Clin Oncol 6:207-218; Fakih and Vincent, (2010) Curr. Oncol. 17(S1):S18-S30; Int. Pat. No. WO2011059762).

[0488] The modified anti-EGFR antibodies provided herein exhibit selectivity for binding to tumor cells compared to non-tumor cell targets, such as basal keratinocytes and other basal cell. Hence, the modified anti-EGFR antibodies can result in reduced side effects when administered to patients compared to currently available anti-EGFR antibodies, including eliminating, minimizing or reducing systemic side effects, including dermal toxicities, while retaining their ability to block EGFR signaling. They also permit dosings to achieve increased efficacy compared to existing therapeutics.

[0489] 3. Cetuximab

[0490] Included among the modified anti-EGFR antibodies provided herein are antibodies that are modified (e.g., contain amino acid replacement with a Glu (E) at a position corresponding to position 104 in the variable heavy chain) compared to the anti-EGFR antibody Cetuximab, antigen-binding fragments thereof or variants thereof (e.g., a humanized form of cetuximab, e.g., Hu225 or H225). Cetuximab (also known as C225 or IMC-C225) is a mouse/human chimeric IgG1 monoclonal antibody that binds to human epidermal growth factor receptor. Cetuximab was derived from M225, which was identified using EGFR from human A431 epidermoid carcinoma cells as an immunogen (Gill et al. (1984) J Biol Chem 259:7755-7760; Sato et al., (1983) Mol Biol Med 1:511-529; Masui et al., (1984) Cancer Res 44:1002-1007; Kawamoto et al. (1983) Proc Natl Acad Sci USA 80:1337-1341). M225 inhibits binding of the epidermal growth factor to the EGF receptor and is an antagonist of in vivo EGF-stimulated tyrosine kinase activity. (Gill et al. (1984) J Biol Chem 259:7755-7760).

[0491] a. Structure

[0492] Cetuximab is a full-length mouse/human chimeric IgG1 antibody. A full-length antibody contains four polypeptide chains, two identical heavy (H) chains (each usually containing about 440 amino acids) and two identical light (L) chains (each containing about 220 amino acids). The light chains exist in two distinct forms called kappa (κ) and lambda (λ). Each chain is organized into a series of domains organized as immunoglobulin (Ig) domains. An Ig domain is characterized by a structure called the Ig fold, which contains two beta-pleated sheets, each containing anti-parallel beta strands connected by loops. The two beta sheets in the Ig fold are sandwiched together by hydrophobic interactions and a conserved intra-chain disulfide bond. The plurality of Ig domains in the antibody chains are organized into a variable (V) and constant (C) region domains.

[0493] The variable domains confer antigen-specificity to the antibody through three portions called complementarity determining regions (CDRs) or hypervariable (HV) regions. The CDR regions are precisely defined and universally numbered in antibodies (see e.g., Kabat, E. A. et al. (1991) Sequences of Proteins of Immunological Interest, Fifth Edition, U.S. Department of Health and Human Services, NIH Publication No. 91-3242, and Chothia, C. et al. (1987) J. Mol. Biol. 196:901-917; AbM (Martin et al. (1989) Proc Natl Acad Sci USA 86:9268-9272; Martin et al. (1991) Methods Enzymol 203:121-153; Pederson et al. (1992) Immunomethods 1:126). Together, the three heavy chain CDRs and the three light chain CDRs make up an antigen-binding site (antibody combining site) of the antibody, which physically interacts with cognate antigen and provides the specificity of the antibody.

[0494] The constant region promotes activation of complement and effector cells. Like CDR regions, constant regions are precisely defined and universally numbered in antibodies using EU index and Kabat numbering schemes (see e.g., Kabat, E. A. et al. (1991) Sequences of Proteins of Immunological Interest, Fifth Edition, U.S. Department of Health and Human Services, NIH Publication No. 91-3242).

[0495] Light chains have two domains, corresponding to the C region (C_{L}) and the V region (V_{L}). Heavy chains have four domains, the V region (V_{H}) and three or four domains in the C region (C_{H}1, C_{H}2, C_{H}3 and C_{H}4), and, in some cases, hinge region. Each heavy chain is linked to a light chain by a disulfide bond, and the two heavy chains are linked to each other by disulfide bonds. Linkage of the heavy chains is mediated by a flexible region of the heavy chain, known as the hinge region.

[0496] Cetuximab (also called C225) is a human-mouse chimeric antibody that contains variable regions from mouse monoclonal antibody 225 (M225) and a human IgG1 constant region. Antibody M225 is described in U.S. Pat. No. 4,494,533, and can be produced from the hybridoma cell line deposited with the American Type Culture Collection (ATCC) as Accession Number HB 11935. The chimeric form was developed to replace the non-human constant region of M225 with the human IgG1 constant region (see e.g., Prewett et al. (1996) J. Immunother. Emphasis Tumor Immunol., 19:419-27). C225 is commercially known as Erbitux® (cetuximab) and is marketed by ImClone and Bristol-Myers Squibb in the United States, and elsewhere by Merck KgaA. Erbitux® was approved by the FDA in March 2006 for use in combination with radiation therapy for treating squamous cell carcinoma of the head and neck (SCCHN) or as a single agent in patients who have had prior platinum-based therapy. Erbitux® is also indicated for treatment of metastatic colon cancer in combination with irinotecan (Camptosar®), a DNA topoisomerase blocker.

[0497] Cetuximab is reported to be composed of 4 polypeptide chains, including 2 identical heavy chains of 449 amino acids each (e.g., set forth in SEQ ID NO: 12), and 2 identical light chains of 214 amino acids each (e.g., set forth in SEQ ID NO: 13) (see IMGT Acc. No. 7906). The variable regions, corresponding to the variable regions of M225, are set forth as amino acid residues 1-119 of SEQ ID NO: 12 (variable heavy chain, set forth in SEQ ID NO: 2) and as amino acid residues 1-107 of SEQ ID NO: 13 (variable light chain, set forth as SEQ ID NO: 4). C225 contains a human IgG1 heavy chain constant region set forth as amino acid residues 120-449 of SEQ ID NO: 12 (set forth in SEQ ID NO: 23) containing human constant domains C_{H}1-C_{H}2-hinge-C_{H}3, including C_{H}1 (amino acid residues 120-217 of SEQ ID NO: 12), a hinge region (amino acid residues 218-232 of SEQ ID NO: 12), C_{H}2 (amino acid residues 233-342 of SEQ ID NO: 12) and C_{H}3 (amino acid residues 343-449 of SEQ ID NO: 12). C225 also contains a human Cκ light chain constant region set forth as amino acid residues 108-213 of SEQ ID NO: 13 (set forth as SEQ ID NO: 34).

[0498] It is understood that some variation exists in reported and generated sequences of

[0499] Cetuximab, e.g., due to sequencing or cloning artifacts or other variations in the generated sequence. For example, various sequence versions of Cetuximab are described in the literature (see, e.g., U.S. Pat. No. 7,060,808; U.S. Publ. Nos. US 2011-0117110 and US 2013-0266579; International Published PCT Appl. No. WO2004085474; GenBank Accession No. CAH61633; DrugBank Acc. No. DB00002; IMGT Acc. No. 7906). Table 5 sets forth exemplary reference Cetuximab sequences that differ in only a few amino acid residues in non-CDR regions of the heavy chain and/or light chain (see also FIGS. 1A and 1B).

[0500] With respect to the exemplary reference sequences set forth in Table 5, the heavy chain is composed of a mouse variable domain (V_{H}, amino acid residues 1-119 of SEQ ID NO: 1, 5, 6 or 12, set forth in SEQ ID NO: 2 or 7) and a light chain composed of a mouse variable domain (V_{L}, amino acid residues 1-107 of SEQ ID NO: 3, 8, 10 or 13, set forth in SEQ ID NO: 4, 9 or 11). The CDRs of cetuximab include, V_{H} CDR 1 (amino acid residues to 31-35, according to Kabat definition, of SEQ ID NO: 2 or 7, set forth in SEQ ID NO: 35); V_{H} CDR 2 (amino acid residues 50-65 of SEQ ID NO: 2 or 7, set forth in SEQ ID NO: 36); V_{H} CDR 3 (amino acid residues 98-108 of SEQ ID NO: 2 or 7, set forth in SEQ ID NO: 37); V_{L} CDR 1 (amino acid residues 24-34 of SEQ ID NO: 4, 9 or 11, set forth in SEQ ID NO: 38); V_{L} CDR 2 (amino acid residues 50-56 of SEQ ID NO: 4, 9 or 11, set forth in SEQ ID NO: 39); and V_{L} CDR 3 (amino acid residues 89-97 of SEQ ID NO: 4, 9 or 11, set forth in SEQ ID NO: 40), see e.g., U.S. Publ. No. US20110117110.

[0501] Humanized versions of cetuximab have been generated in which the variable regions of the murine heavy and light chains have been humanized by amino acid replacements in the framework regions (see Table 5). For example, U.S. Pat. No. 7,060,808 describes H225, which contains a variable heavy chain having the sequence of amino acids set forth in SEQ ID NO: 14 and a variable light chain having the sequence of amino acids set forth in SEQ ID NO: 15. Another humanized variant, designated Hu225, is described in U.S. Published Appl. No. US 2011/0117110, which is an antibody that contains a variable heavy chain having the sequence of amino acids set forth in SEQ ID NO: 16 and a variable light chain having the sequence of amino acids set forth in SEQ ID NO: 17. The CDRs of the humanized variants are identical to M225 and to the C225 and other reported cetuximab antibodies as described above. These humanized antibodies exhibit reduced immunogenicity as compared to cetuximab. As described elsewhere herein with respect to the modified anti-EGFR variants provided herein, the humanized variants of cetuximab can be full-length antibodies or can be antigen-binding fragments thereof, including Fab′, F(ab′)₂, Fab, Fv, rIgG, and scFv fragments. As a full-length antibody, the humanized antibodies can possess any immunoglobulin isotype or class (e.g., IgG, IgM, IgD, IgE, IgA and IgY), any subclass (e.g., IgG1, IgG2, IgG3, IgG4, IgA1 and IgA2) or sub-subclass (e.g., IgG2a and IgG2b).

TABLE 5
Exemplary SEQ ID NOS of heavy chain (HC) and light
chain (LC) of Cetuximab or Cetuximab Derivatives

| | heavy chain | | light chain | |
|---|---|---|---|---|
| | (SEQ ID NO) | | (SEQ ID NO) | |
| | | variable region | | variable region |
| | full length | (1-119) | full length | (1-107) |
| | 1 | 2 | 3 | 4 |
| | 5 | 2 | 3 | 4 |
| | 12 | 2 | 13 | 4 |
| | 6 | 7 | 8 | 9 |
| | 6 | 7 | 10 | 11 |
| Humanized | — | 14 | — | 15 |
| | — | 16 | — | 17 |

[0502] Other cetuximab variants also have been described and are known in the art, which exhibit altered properties or activities (see, e.g., U.S. Pat. Nos. 7,657,380, 7,930,107, 7,060,808, 7,723,484, U.S. Pat. Publ. Nos. 2011014822, 2005142133, 2011117110, International Pat. Pub. Nos. WO2012003995, WO2010080463, WO2012020059, WO2008152537, and Lippow et al. (2007) Nat Biotechnol. 25(10):1171-1176).

[0503] The modifications described herein can be in any cetuximab, antigen-binding fragment or variant thereof, including any known in the art.

[0504] b. Function

[0505] Cetuximab specifically binds to EGFR. The crystal structure of cetuximab Fab bound to the extracellular domain of the EGFR (sEGFR) has been determined (Li et al., (2005) Cancer Cell 7:301-311). Cetuximab binds to domain III of the epidermal growth factor receptor (amino acids 310-514 of SEQ ID NO: 43), with an epitope that partially overlaps with the natural ligand epidermal growth factor. Residues ^{L27}Gln, ^{L50}Tyr ^{L94}Trp (e.g., with reference to the variable region set forth in SEQ ID NO: 4) and ^{H52}Trp, ^{H58}Asp, ^{H101}Tyr, ^{H102}Tyr, ^{H103}Asp and ^{H104}Tyr (e.g., with reference to the variable region set forth in SEQ ID NO: 2) of cetuximab make contacts with domain III of sEGFR. The light chain of cetuximab binds to the C-terminal domain of EGFR, with V_{L} CDR 1 residue ^{L27}Gln of cetuximab binding to residue N473 of sEGFR. V_{H} CDR 3 residue ^{H102}Tyr protrudes into a hydrophobic pocket on the surface of a large β sheet of domain III, making hydrogen bonds to glutamine side chains of Q384 and Q408 of sEGFR. V_{H} CDR 2 and V_{H} CDR 3 lie over the hydrophobic pocket, anchored by side chain to side chain hydrogen bonds between ¹¹⁵²Trp and 5418 of sEGFR and ^{H104}Tyr and 5468 of sEGFR, side chain to main chain interactions between ^{H54}Gly and ^{H103}Asp carbonyl oxygens and sEGFR 5440 and R353, and indirect hydrogen bonds between ^{H56}Asn and 5418 and Q384 of sEGFR. In addition to blocking the binding of EGF to sEGFR, the variable heavy chain of cetuximab sterically blocks domain I thereby preventing domain II from adopting a conformation necessary for dimerization.

[0506] Cetuximab binds to the extracellular domain of EGFR on both normal and tumor cells preventing ligand binding and subsequent activation (Li et al., (2005) Cancer Cell 7:301-311; Blick et al., (2007) Drugs 67(17):2585-2607). Cetuximab competitively inhibits the binding of epidermal growth factor and transforming growth factor alpha (TGF-alpha) preventing cell growth and metastatic spread. That is, binding of cetuximab blocks phosphorylation and activation of tyrosine-receptor kinases, resulting in inhibition of cell growth, induction of apoptosis, decreased matrix metalloprotease secretion and reduced vascular endothelial growth factor production. Cetuximab also can induce an antitumor effect through inhibition of angiogenesis. Cetuximab inhibits expression of VEGF, IL-8 and bFGF in the highly metastatic human TCC 253JB-V cells in a dose-dependent manner and decrease microvessel density (Perrotte et al. (1999), Clin. Cancer Res., 5:257-264). Cetuximab can down-regulate VEGF expression in tumor cells in vitro and in vivo (Petit et al. (1997), Am. J. Pathol., 151:1523-1530; Prewett et al. (1998), Clin. Cancer Res. 4:2957-2966). Cetuximab is also involved in complement activation and antibody-dependent cellular cytotoxicity (ADCC) and receptor internalization.

### C. MODIFIED ACTIVE ANTI-EGFR ANTIBODIES WITH ACIDIC pH SELECTIVITY

[0507] Provided herein are modified anti-EGFR antibodies or antigen-binding fragments that contain an amino acid replacement with glutamic acid (Glu, E) at a position corresponding to position 104 (designated 104E) of the variable domain of the heavy chain of an anti-EGFR antibody with reference to SEQ ID NO: 2 or 7. A position corresponding to position 104 in an unmodified anti-EGFR antibody can be determined by alignment of the variable heavy chain with the variable heavy chain set forth in SEQ ID NO: 2 or 7 (see, e.g., FIG. 2). Also provided herein are modified anti-EGFR antibodies or antigen-binding fragments that contain a corresponding replacement to the conservative amino acid aspartic acid (D) at a position corresponding to position 104 (designated 104E) of the variable domain of the heavy chain of an anti-EGFR antibody with reference to SEQ ID NO: 2 or 7.

[0508] The modified anti-EGFR antibodies provided herein that contain the amino acid replacement corresponding to 104E specifically bind to EGFR antigen (e.g., human EGFR) or soluble fragment thereof. The binding activity of the modified anti-EGFR antibodies provided herein is greater under conditions that include one or both of acidic pH of from 6.0 to 6.5, inclusive, and a lactate concentration of 15 mM to 20 mM, inclusive compared to under conditions that include one or both of neutral pH of or about 7.4 and a lactate concentration of or about 1 mM. For example, the ratio of binding activity under conditions that include one or both of pH 6.0 to 6.5 and 15 mM to 20 mM lactate versus binding activity under conditions that include one or both of or about pH 7.4 and/or of or about 1 mM lactate can be at least or greater than 1.1, 1.2, 1.3, 1.4, 1.5, 1.6, 1.7, 1.8, 1.9, 2.0, 2.5, 3.0, 3.5, 4.0, 4.5, 5.0, 6.0, 7.0, 8.0, 9.0, 10.0, 11.0, 12.0, 13.0, 14.0, 15.0, 20.0, 25.0, 30.0, 35.0, 40.0, 45.0, 50.0 or more. The modified anti-EGFR antibodies provided herein can exhibit the altered binding activity in the presence of physiologic concentrations of protein (e.g., 25% serum). Hence, the antibodies provided herein can exhibit tumor selective EGFR binding activity, whereby binding activity is greater under conditions that exist in a tumor microenvironment compared to conditions that exist in a non-tumor microenvironment.

[0509] The modified anti-EGFR antibody, or antigen-binding fragment thereof, provided herein minimally contain a variable heavy chain and a variable light chain, or a portion thereof that is sufficient to bind EGFR antigen (e.g., human EGFR), or a soluble fragment thereof, when assembled into an antibody, whereby at least the variable heavy chain is modified by replacement with 104E. The resulting modified anti-EGFR antibodies can be full-length IgG (e.g., IgG1) antibodies, or can be fragments thereof, for example, a Fab, Fab′, F(ab′)₂, single-chain Fv (scFv), Fv, dsFv, diabody, Fd and Fd′ fragments. Further, the resulting modified anti-EGFR antibodies can contain a domain other than IgG1.

[0510] The modified anti-EGFR antibody provided herein can contain only an amino acid replacement 104E, or a corresponding replacement to the conservative amino acid aspartic acid (D), in the variable heavy chain compared to the unmodified anti-EGFR antibody. In other examples of modified anti-EGFR antibodies provided herein, additional amino acid replacements or modifications in one or both of the heavy chain or light chain can be included in the anti-EGFR antibodies provided herein. For example, modified anti-EGFR antibodies provided herein can contain at least or 1, 2, 3, 4, 5, 6, 7, 8, 9, 10, 11, 12, 13, 14, 15, 16, 17, 18, 19, 20, or more modified positions compared to the anti-EGFR antibody not containing the modification. It is understood that in all examples of the modified anti-EGFR antibodies provided herein, the modified anti-EGFR antibody contains an amino acid replacement 104E, or corresponding conservative amino acid replacement, compared to the unmodified anti-EGFR antibody, and exhibits greater binding activity under conditions that include one or both of acidic pH of from 6.0 to 6.5, inclusive, and/or a lactate concentration of 15 mM to 20 mM, inclusive, compared to under conditions that include one or both of neutral pH of or about 7.4 and/or a lactate concentration of or of about 1 mM.

[0511] The unmodified anti-EGFR antibody can be a cetuximab antibody, antigen-binding fragment thereof or variant thereof. Exemplary unmodified anti-EGFR antibodies to which the amino acid replacement(s) herein can be made, including amino acid replacement 104E, include, but are not limited to, an anti-EGFR cetuximab antibody or antigen-binding fragment or variant thereof that contains a heavy chain set forth in any of SEQ ID NOS: 1, 2, 5, 6, 7, 12, 14 or 16, or an antigen-binding fragment or variant thereof containing at least 75%, 80%, 81%, 82%, 83%, 84%, 85%, 86%, 86%, 88%, 89%, 90%, 91%, 92%, 93%, 94%, 95%, 96%, 97%, 98%, 99% or more sequence identity to any of SEQ ID NOS: 1, 2, 5, 6, 7, 12, 14 or 16. For example, an unmodified anti-EGFR antibody can contain a sequence of amino acids including a variable heavy chain (VH) set forth in SEQ ID NO: 2 and variable light chain (VL) set forth in SEQ ID NO: 4, a VH set forth in SEQ ID NO: 7 and a VL set forth in SEQ ID NO: 9, a VH set forth in SEQ ID NO: 7 and a VL set forth in SEQ ID NO: 11, a VH set forth in SEQ ID NO: 14 or a VL set forth in SEQ ID NO: 15, or a VH set forth in SEQ ID NO: 16 or a VL set forth in SEQ ID NO: 17, or variant thereof that contains a variable heavy and/or variable light chain that exhibits least 75%, 80%, 81%, 82%, 83%, 84%, 85%, 86%, 86%, 88%, 89%, 90%, 91%, 92%, 93%, 94%, 95%, 96%, 97%, 98%, 99% sequence identity to one or both of the variable heavy or light chains SEQ ID NOS. The unmodified anti-EGFR antibody can be a full-length antibody or antigen-binding fragment thereof. For example, the unmodified anti-EGFR antibody can contain any of the VH or VL regions above and a constant region of the heavy and light chain including a heavy chain set forth in SEQ ID NO: 1 and a light chain set forth in SEQ ID NO: 3, a heavy chain set forth in SEQ ID NO: 5 and a light chain set forth in SEQ ID NO: 3, a heavy chain set forth in SEQ ID NO: 12 and a light chain set forth in SEQ ID NO: 13, a heavy chain set forth in SEQ ID NO: 6 and a light chain set forth in SEQ ID NO: 8 or a heavy chain set forth in SEQ ID NO: 6 and a light chain set forth in SEQ ID NO: 10, or can be an antigen-binding fragment of the full-length antibody or variant thereof that contains a heavy and/or light chain that exhibits least 75%, 80%, 81%, 82%, 83%, 84%, 85%, 86%, 86%, 88%, 89%, 90%, 91%, 92%, 93%, 94%, 95%, 96%, 97%, 98%, 99% to one or both of the heavy or light chains SEQ ID NOS. In any of such examples, modified anti-EGFR antibodies or antigen-binding fragments thereof provided herein can contain a variable heavy chain with the amino acid replacement Y104E, where the tyrosine (Y) at a position corresponding to position 104 is replaced with E. In some examples, the amino acid residue that is modified (e.g., replaced) at the position corresponding to position 104 is a conservative residue or a semi-conservative amino acid residue to the amino acid set forth in SEQ ID NO: 2 or 7.

[0512] For purposes herein, reference to positions and amino acids for modification, including amino acid replacement or replacements, are with reference to the variable heavy chain of the wild-type cetuximab antibody, set forth in SEQ ID NO: 2 or 7, and the variable light of the wild-type cetuximab antibody chain, set forth in SEQ ID NO: 4. It is within the level of one of skill in the art to make any of the modifications in the variable heavy chain (including 104E) or variable light chain in another anti-EGFR antibody by identifying the corresponding amino acid residue in the variable heavy chain or variable light chain of the unmodified anti-EGFR antibody by alignment of the anti-EGFR antibody heavy chain or light chain with the reference anti-EGFR variable heavy chain set forth in SEQ ID NO: 2 or 7 or variable light chain set forth in SEQ ID NO: 4. For example, FIGS. 2A and 2B depict alignment of the heavy chain of exemplary anti-EGFR antibodies with SEQ ID NO: 2 and 7 and FIGS. 2C and 2D depict alignment of the light chain of exemplary anti-EGFR antibodies with SEQ ID NO: 4, 9 or 11. For purposes of modification (e.g., amino acid replacement), the corresponding amino acid residue at the replaced position can be any amino acid residue, and need not be identical to the residues set forth in SEQ ID NO: 2 or 7 or SEQ ID NO: 4. Typically, the corresponding amino acid residue identified by alignment with residues in SEQ ID NO: 2 or 7 or SEQ ID NO: 4 is an amino acid residue that is identical to SEQ ID NO: 2 or 7 or SEQ ID NO: 4, or is a conservative or semi-conservative amino acid residue thereto (see e.g., FIG. 2). As an example, the residue at the position corresponding to position 104 is a Tyr (Y) in SEQ ID NOS: 2 and 7. Thus, the corresponding residue in an unmodified anti-EGFR antibody that is replaced by glutamic acid (E), i.e., corresponding to Y104E in SEQ ID NO: 2 or 7, can be a conservative amino acid residue, such as tryptophan (Trp, W104E) or phenylalanine (Phe, F104E) (see Table 4).

[0513] It is also understood that the exemplary replacements provided herein can be made at the corresponding residue in an anti-EGFR antibody heavy chain or light chain, such as in the variable region of the heavy chain or light chain, as long as the replacement is different than the amino acid that exists in the unmodified form of the anti-EGFR antibody heavy chain or light chain. Based on this description and the description elsewhere herein, it is within the level of one of skill in the art to generate a modified anti-EGFR antibody containing any one or more of the described mutations, and test each for a property or activity as described herein.

[0514] The modified anti-EGFR antibodies provided herein can exhibit greater or increased binding activity to EGFR antigen (e.g., human EGFR or soluble form thereof) under conditions that include an acidic pH from 6.0 to 6.5, inclusive, and/or a weaker binding under conditions that include a neutral pH of 7.4 compared to the corresponding form of the unmodified anti-EGFR antibody, such as compared to the corresponding form of a wildtype cetuximab containing a heavy chain variable domain sequence of amino acids set forth in SEQ ID NO: 2 or 7. Typically, the modified anti-EGFR antibodies provided herein exhibit weaker binding activity to EGFR antigen or soluble fragment thereof (e.g., human EGFR or soluble form thereof) at neutral pH of 7.4 compared to the corresponding form of the unmodified anti-EGFR antibody, such as a compared to the corresponding form of a wildtype cetuximab containing a heavy chain variable domain sequence of amino acids set forth in SEQ ID NO: 2 or 7. In particular examples, the antibodies provided herein retain or exhibit similar or increased binding activity at pH 6.0 to pH 6.5, inclusive, compared to binding activity of the unmodified anti-EGFR antibody under the same conditions, but exhibit decreased binding activity at neutral pH of about pH 7.4, such as less than 20%, 30%, 40%, 50%, 60%, 70%, 80%, 90%, 95% binding activity at pH 7.4, than the corresponding form of the unmodified anti-EGFR antibody. For example, the modified anti-EGFR antibodies provided herein exhibit at least or about at least 2-fold, 3-fold, 4-fold, 5-fold, 6-fold, 7-fold, 8-fold, 9-fold, 10-fold, 11-fold, 12-fold, 13-fold, 14-fold, 15-fold, 20-fold, 25-fold, 30-fold, 40-fold, 50-fold or more weaker binding activity at neutral pH of 7.0 to 7.4, inclusive, compared to the corresponding form of the unmodified anti-EGFR antibody.

[0515] The binding activity to an EGFR antigen (e.g., human EGFR or soluble form thereof) can be determined or assessed based on any methods known to a person of skill in the art to assess binding of an antibody, or antigen-binding fragment, to EGFR (e.g., human EGFR). Examples of such assays are described in Section E. Such assays include, but are not limited to, solid phase-binding assay such as an immunoassay (e.g., enzyme-linked immunosorbent assay; ELISA) affinity-based biosensor assay (e.g., BIAcore technology), or in vivo binding assays. In such assays, the binding activity can be measured or represented as a detectable signal (e.g., spectrophotometric measurement or fluorescent measurement of binding), the concentration of half-maximal binding (EC₅₀) or a kinetic measure of binding (e.g., dissociation constant, K_{d}, association constant Kₐ, off-rate or other kinetic parameter of binding affinity). A skilled artisan understands that, depending on the particular assay used, a higher binding activity can be represented in some instances by a higher value and a weaker binding activity can be represented by a lower value (e.g., when binding activity is represented as the K_{A} or when represented as a measurement of binding signal). In other instances, a higher binding activity can be represented as a lower value and a weaker binding activity can be measured as a higher value (e.g., when binding activity is represented as the KD or off-rate).

[0516] For purposes herein, it is understood that a ratio of binding activity of at least or greater than 1.1, 1.2, 1.3, 1.4, 1.5, 1.6, 1.7, 1.8, 1.9, 2.0, 2.5, 3.0, 3.5, 4.0, 4.5, 5.0, 6.0, 7.0, 8.0, 9.0, 10.0, 11.0, 12.0, 13.0, 14.0, 15.0, 20.0, 25.0, 30.0, 35.0, 40.0, 45.0, 50.0 or more means that the modified anti-EGFR antibody exhibits the fold-difference higher binding activity (e.g., higher or tighter binding affinity) for EGFR antigen (e.g., human EGFR or a soluble fragment thereof) under conditions that include one or both of pH 6.0 to 6.5 and/or 15 mM to 20 mM lactate than under conditions that include pH 7.4 and 1 mM lactate. For example, a ratio of binding activity of at least 2.0 means that there is at least 2-fold tighter affinity, a ratio of binding activity of at least 3.0 means that there is at least 3-fold tighter affinity, a ratio of binding activity of at least 4.0 means that there is at least 4-fold tighter affinity, a ratio of binding activity of at least 5.0 means that there is at least 5-fold tighter affinity, a ratio of binding activity of at least 10.0 means that there is at least 10-fold tighter affinity.

[0517] In other examples, a ratio of binding activity of at least 2.0 means that the antibody exhibits an off-rate that is at least 2 times slower, a ratio of binding activity of at least 3.0 means that the antibody exhibits an off-rate that is at least 3 times slower, a ratio of binding activity of at least 4.0 means that the antibody exhibits an off-rate that is at least 4 times slower, a ratio of binding activity of at least 5.0 means that the antibody exhibits an off-rate that is at least 5 times slower, a ratio of binding activity of at least 10.0 means that the antibody exhibits an off-rate that is at least 10 times slower. In such examples, when binding activity is measured as an EC₅₀, K_{D}, a higher binding activity (e.g., tighter binding affinity) is represented by a lower concentration, such that a ratio of binding activity at pH 6.0 to 6.5 and/or 15 mM to 20 mM lactate versus pH 7.4, 1 mM lactate is represented as the quotient of the inverse of the EC₅₀ or K_{d} at pH 6.0 to 6.5 and/or 15 mM to 20 mM lactate versus the inverse of the EC₅₀ or K_{D} at pH 7.4, 1 mM lactate. As an example, the ratio of binding activity of an antibody that is measured to have an EC₅₀ of 4 mM at pH 6.0 to 6.5 and 15 mM to 20 mM lactate and an EC₅₀ of 16 mM at pH 7.4, 1 mM lactate is 4.0 (1/4/1/16).

[0518] The modified anti-EGFR antibodies, or antigen-binding fragments provided herein, typically have a dissociation constant (K_{D}) for binding EGFR (e.g., human EGFR) or a soluble fragment thereof that is less than 1×10⁻⁸M, 5×10⁻⁹ M, 1×10⁻⁹M, 5×10⁻¹° M, 1×10⁻¹⁰ M, 5×10⁻¹¹ M, 1×10⁻¹¹ M or less under conditions that include acidic pH 6.0 to 6.5, inclusive, and/or 15 mM to 20 mM lactate. The modified anti-EGFR antibodies, or antigen-binding fragments thereof provided herein, typically have an association constant (K_{A}) for binding EGFR (e.g., human EGFR) or a soluble fragment thereof that is greater than 1×10⁸ M⁻¹, 5×10⁹M⁻¹, 1×10⁹M⁻¹, 5×10¹⁰ M⁻¹, 1×10¹⁰ M⁻¹, 5×10¹¹M⁻¹, 1×10¹¹M⁻¹ or more under conditions that include acidic pH 6.0 to 6.5, inclusive and/or 15 mM to 20 mM lactate. In other examples, the modified anti-EGFR antibodies, or antigen-binding fragment thereof provided herein, typically have an EC₅₀ for binding EGFR (e.g., human EGFR), or a soluble fragment thereof, that is less than 10 mM, 5 mM, 4 mM, 3 mM, 2 mM, 1 mM or less under conditions that include acidic pH 6.0 to 6.5, inclusive, and/or 15 mM to 20 mM lactate. In particular examples, the anti-EGFR antibodies provided herein exhibit at least a 1.5-fold, 2-fold, 2.5-fold, 3-fold, 4-fold, 5-fold, 6-fold, 7-fold, 8-fold, 9-fold, 10-fold or more decrease in binding affinity (e.g., K_{d} or EC₅₀) for EGFR antigen (e.g., human EGFR or soluble fragment) at pH 7.4, 1 mM lactate while retaining comparable binding to EGFR at pH 6.0 to 6.5, inclusive, 16.6 mM lactate, and hence exhibit a greater ratio of binding activity (e.g., higher affinity or tighter affinity binding) at pH 6.0 to 6.5, inclusive, and/or 15 mM to 20 mM lactate compared to pH 7.4, 1 mM lactate of at least or greater than 1.1, 1.2, 1.3, 1.4, 1.5, 1.6, 1.7, 1.8, 1.9, 2.0, 2.5, 3.0, 3.5, 4.0, 4.5, 5.0, 6.0, 7.0, 8.0, 9.0, 10.0, 11.0, 12.0, 13.0, 14.0, 15.0, 20.0, 25.0, 30.0, 35.0, 40.0, 45.0, 50.0 or more.

[0519] Hence, by virtue of the altered binding activity of the modified anti-EGFR antibodies provided herein, the antibodies exhibit increased binding selectivity or activity for EGFR antigen in a tumor microenvironment than in a non-tumor microenvironment (e.g., basal layer of the skin). An altered pH microenvironment is the most common microenvironment found in tumor microenvironments (see e.g., Fogh Andersen et al. (1995) Clin. Chem., 41:1522-1525; Bhujwalla et al. (2002) NMR Biomed., 15:114-119; Helmlinger et al. (1997) Nature Med., 3:177; Gerweck and Seetharaman (1996), Cancer Res. 56(6):1194-1198). For example, in many tumors the ‘Warburg effect’ creates a microenvironment with a pH ranging from 5.6 to 6.8. Also, elevated lactate levels have been found associated with a variety of tumors including, but not limited to, head and neck, metastatic colorectal cancer, cervical cancer and squamous cell carcinoma (see e.g., Walenta et al. (1997) American Journal of Pathology 150(2): 409-415; Schwickert et al. (1995) Cancer Research 55: 4757-4759; Walenta et al. (2000) Cancer Research 60: 916-921; Guo et al. (2004) J Nucl Med 45: 1334-1339; Mathupala et al. (2007) J Bioenerg Biomembr 39: 73-77; Holroyde et al. (1979) Cancer Research 39: 4900-4904; Schurr and (2007) Neuroscience 147: 613-619; Quennet et al. (2006) Radiotherapy and Oncology 81: 130-135). In many tumors, the ‘Warburg effect’ creates a microenvironment with lactate concentrations between 10 to 20 mM. In contrast to the tumor microenvironment, the dermis, where many side effects that result from administration of anti-EGFR antibodies are localized, exhibits a neutral pH (e.g., pH 7.4) and normal lactate levels (e.g., 0.5 M to 2 mM).

[0520] Generally, the modified anti-EGFR antibodies provided herein exhibit the ratio of activity in the presence of physiological levels of protein. In an in vivo or physiological environment, the interstitial protein concentration (such as albumin) is anywhere from 20-50% of plasma. Serum contains about 60-80 g/L protein, and various tissues have been demonstrated to contain 12 mg/mL to 40 mg/mL interstitial protein (see, e.g., Aukland and Reed (1993) Physiological Reviews, 73:1-78). Hence, the modified anti-EGFR antibodies provided herein can exhibit the ratio of binding activity in the presence of 10 mg/mL to 50 mg/mL protein, such as at least at least 12 mg/mL to 40 mg/mL protein (e.g., at least 12 mg/mL, 15 mg/mL, 20 mg/mL, 25 mg/mL, 30 mg/mL, 35 mg/mL or 40 mg/mL protein), which, for example, can be provided in serum, such as human serum, or as a serum albumin, such as human serum albumin, or other protein that does not interact with the antibody or receptor or otherwise directly alter antibody-receptor interactions. For example, the modified anti-EGFR antibodies provided herein can exhibit the ratio of binding activity in the presence of 20% to 50% serum (vol/vol), such as 20% to 50% human serum, such as at least 20%, 25%, 30%, 35%, 40%, 45% or 50% serum (vol/vol).

[0521] Thus, by virtue of the greater ratio of binding activity under conditions that include one or both of an acidic pH from 6.0 to 6.5, inclusive, and/or 15 mM to 20 mM lactate compared to under conditions that include neutral pH of 7.4, and 1 mM lactate the modified anti-EGFR antibodies provided herein exhibit greater binding activity to an EGFR antigen (e.g., human EGFR) in a tumor microenvironment than a non-diseased or non-tumor microenvironment environment, such as those found in the skin or basal layer of the skin. Thus, the modified anti-EGFR antibodies provided herein exhibit selective activity against tumors, and reduced binding activity to cells in non-tumor microenvironments. Such selectivity achieved by their conditional binding activity minimizes the undesired activity on non-tumor cells, such as basal keratinocytes of the skin. Thus, the modified anti-EGFR antibodies, or antigen binding fragments thereof, provided herein confer reduced or fewer side effects when administered to subjects.

[0522] The modified anti-EGFR antibodies provided herein can exhibit increased inhibitory activity against EGFR in a tumor microenvironment compared to a non-diseased environment. Such inhibitory activities include, but are not limited to, inhibition of ligand-induced phosphorylation, dimerization and/or cell growth. As a result of such activities, antibodies provided herein exhibit tumor growth inhibition when administered in vivo to a subject having a tumor, such as a solid tumor. Tumor growth can be inhibited 30%, 40%, 50%, 60%, 70%, 80%, 90% or more compared to the growth of tumors in the absence of administered antibody. The functional activity of the modified anti-EGFR antibodies provided herein can be less than, similar to or greater than existing anti-EGFR therapies, such as therapies with cetuximab, when assessed in tumor models, provided the activity in non-diseased tissues is reduced. Reduced activity is demonstrated, for example, by decreased incidence or severity of a skin rash. For example, the provided anti-EGFR antibodies, or antigen binding fragments thereof, exhibit reduced dermal toxicity. Dermal toxicity, such as skin rash, can be assessed by standard assays known to one of skill in the art and described herein. For example, the anti-EGFR antibodies, or antigen binding fragments thereof, provided herein exhibit at least a 1.5-fold, 2-fold, 2.5-fold, 3-fold, 4-fold, 5-fold, or more decreased rash, such as assessed in a primate model.

[0523] The modified anti-EGFR antibodies provided herein can be produced by standard recombinant DNA techniques known to one of skill in the art. Any method known in the art to effect mutation of any one or more amino acids in a target protein can be employed.

[0524] Methods include standard site-directed or random mutagenesis of encoding nucleic acid molecules, or solid phase polypeptide synthesis methods. For example, nucleic acid molecules encoding a heavy chain or light chain of an anti-EGFR antibody can be subjected to mutagenesis, such as random mutagenesis of the encoding nucleic acid, error-prone PCR, site-directed mutagenesis, overlap PCR, gene shuffling, or other recombinant methods. The nucleic acid encoding the anti-EGFR antibodies can then be introduced into a host cell to be expressed heterologously. Hence, also provided herein are nucleic acid molecules encoding any of the modified anti-EGFR antibodies provided herein.

[0525] Non-limiting examples of modified anti-EGFR antibodies, as provided herein, are described below.

[0526] 1. Modified Anti-EGFR Antibodies Containing Y104E

[0527] Provided herein are modified anti-EGFR antibodies containing an amino acid replacement glutamic acid (E) at position 104 (104E) of an unmodified anti-EGFR antibody with reference to positions set forth in SEQ ID NO: 2 or 7. Further modifications (e.g., amino acid replacement), such as any described elsewhere herein below, can be incorporated into the heavy chain and/or light chain of anti-EGFR antibodies and EGFR-binding fragments, in addition to the 104E amino acid replacement, as long as the resulting modified anti-EGFR antibody or antigen-binding fragment thereof exhibits greater binding activity under conditions that include acidic pH of from 6.0 to 6.5, inclusive, and/or a lactate concentration of 15 mM to 20 mM, inclusive, compared to under conditions that include neutral pH of or about 7.4, and/or 1 mM lactate concentration. The further modifications can be in the variable heavy chain and/or variable light chain of the antibody or antigen-binding fragment thereof. Further modifications also can be made to an anti-EGFR antibody that also contains other modifications, including modifications in the variable regions of the antibody and modifications in the constant regions of the antibody, for example, in the C_{H}1, hinge, C_{H}2, C_{H}3 or C_{L} regions.

[0528] Also, it is understood that a 104E anti-EGFR antibody or antigen-binding fragment thereof, including any containing one or more additional modifications in the heavy chain and/or light chain as described herein below, can be further modified by humanization, as long as the resulting modified anti-EGFR antibody or antigen-binding fragment thereof exhibits greater binding activity under conditions that include acidic pH of from 6.0 to 6.5, inclusive, and/or a lactate concentration of 15 mM to 20 mM, inclusive, compared to under conditions that include neutral pH of or about 7.4 and/or a lactate concentration of or about 1 mM.

[0529] The amino acid replacement(s), including amino acid replacement 104E, can be made in an unmodified anti-EGFR antibody containing: a variable heavy chain having a sequence of amino acids set forth in SEQ ID NO: 2 and a variable light chain having a sequence set forth in SEQ ID NO: 4, a variable heavy chain having the sequence of amino set forth in SEQ ID NO: 7 and a variable light chain having the sequence of amino acids set forth in SEQ ID NO: 9, or a variable heavy chain having the sequence of amino set forth in SEQ ID NO: 7 and a variable light chain having the sequence of amino acids set forth in SEQ ID NO: 11, or in an unmodified anti-EGFR antibody that contains a variant of the variable heavy chain set forth in SEQ ID NO: 2 or 7 and/or contains a variant of the light chain set forth in SEQ ID NO: 4, 9 or 11 that exhibit at least 65%, 70%, 75%, 80%, 85%, 86%, 87%, 88%, 89%, 90%, 91%, 92%, 93%, 94%, 95%, 96%, 97%, 98%, 99% or more sequence identity thereto. For example, the amino acid replacement can be made in a humanized cetuximab antibody containing: a variable heavy chain having the sequence of amino acids set forth in SEQ ID NO: 14 and a variable light chain having the sequence of amino acids set forth in SEQ ID NO: 15, or a variable heavy chain having the sequence of amino acids set forth in SEQ ID NO: 16 or a variable light chain having the sequence of amino acids set forth in SEQ ID NO: 17, or in sequence variants that exhibit at least 65%, 70%, 75%, 80%, 85%, 86%, 87%, 88%, 89%, 90%, 91%, 92%, 93%, 94%, 95%, 96%, 97%, 98%, 99% or more sequence identity to the variable heavy chain set forth in SEQ ID NO: 14 or 16 and/or the variable light chain set forth in SEQ ID NO: 15 or 17.

[0530] For example, provided herein are modified anti-EGFR antibodies containing an amino acid replacement 104E containing a heavy chain variable domain having the sequence of amino acids set forth in any of SEQ ID NOS: 74 or 75, or a sequence of amino acids that is at least 65%, 70%, 75%, 80%, 85%, 86%, 87%, 88%, 89%, 90%, 91%, 92%, 93%, 94%, 95%, 96%, 97%, 98%, 99% identical to any of SEQ ID NOS: 74 or 75 and contains at least the amino acid replacement 104E; and a light chain variable domain set forth in any of SEQ ID NOS: 4, 9, 11, 15 or 17, or a sequence of amino acids that is at least 65%, 70%, 75%, 80%, 85%, 86%, 87%, 88%, 89%, 90%, 91%, 92%, 93%, 94%, 95%, 96%, 97%, 98%, 99% identical to any of SEQ ID NOS: 4, 9, 11, 15 or 17. The modified anti-EGFR antibodies provided herein can be a full-length antibody or an antigen-binding fragment thereof that contains a sufficient portion of the variable heavy chain or variable light chain to bind antigen when assembled into an antibody, wherein the variable heavy chain at least contains the amino acid replacement 104E. Exemplary of such modified anti-EGFR antibodies are provided below.

[0531] a. Additional Modifications

[0532] Also provided herein are 104E anti-EGFR antibodies or antigen binding fragments thereof that can contain modifications in addition to the 104E amino acid replacement. The additional modifications can be single amino acid modifications, such as single amino acid replacements or substitutions, insertions or deletions, or multiple amino acid modifications, such as multiple amino acid replacements, insertions or deletions. Exemplary modifications are amino acid replacements, including single or multiple amino acid replacements. Modified anti-EGFR antibodies provided herein can contain at least 2, 3, 4, 5, 6, 7, 8, 9, 10, 11, 12, 13, 14, 15, 16, 17, 18, 19, 20, or more modified positions compared to the unmodified anti-EGFR antibody not containing the modification(s). The amino acid replacement(s) can be conservative substitution(s), such as set forth in Table 4, or a non-conservative substitution, such as any described herein.

### i. Additional Heavy Chain Modifications

[0533] Provided herein are modified anti-EGFR antibodies that contain an amino acid replacement of Glu (E) at position 104 (i.e., 104E), and optionally additional modification(s), such as one or more amino acid replacement(s), in a variable heavy chain of an unmodified anti-EGFR antibody (e.g., cetuximab), antigen-binding fragment thereof or variant thereof. The resulting modification(s) can be in a variable heavy chain set forth in SEQ ID NO: 2 or 7, or a variant thereof having at least 75%, 80%, 81%, 82%, 83%, 84%, 85%, 86%, 86%, 88%, 89%, 90%, 91%, 92%, 93%, 94%, 95%, 96%, 97%, 98%, 99% or more sequence identity thereto. For example, the resulting modifications can be in an unmodified anti-EGFR antibody containing a variable heavy chain set forth in SEQ ID NO: 14 or SEQ ID NO: 16, or in a variant thereof or portion thereof having at least 75%, 80%, 81%, 82%, 83%, 84%, 85%, 86%, 86%, 88%, 89%, 90%, 91%, 92%, 93%, 94%, 95%, 96%, 97%, 98%, 99% or more sequence identity thereto. The modifications also can be in a full-length heavy chain containing any of the above variable heavy chains, such as any set forth in any of SEQ ID NOS: 1, 5, 6, or 12, or in a variant thereof or portion thereof having at least 75%, 80%, 81%, 82%, 83%, 84%, 85%, 86%, 86%, 88%, 89%, 90%, 91%, 92%, 93%, 94%, 95%, 96%, 97%, 98%, 99% or more sequence identity thereto. The modification can be in a complementarity determining region (CDR) or in a framework region.

[0534] For example, the modified anti-EGFR antibodies or antigen-binding fragments thereof can contain any one or more amino acid replacements set forth in Table 32. In particular, provided herein are modified anti-EGFR antibodies or antigen-binding fragments thereof containing a variable heavy chain, or portion thereof, with the amino acid replacement 104E and one or more other amino acid replacement(s) or substitution(s) at any of positions corresponding to positions 23, 24, 25, 26, 27, 28, 29, 30, 31, 32, 33, 34, 35, 36, 50, 51, 52, 53, 54, 55, 56, 57, 58, 59, 60, 61, 62, 63, 64, 65, 66, 67, 68, 69, 70, 71, 72, 73, 74, 75, 76, 77, 93, 94, 97, 98, 99, 100, 101, 102, 103, 105, 106, 107, 108, 109, 110, 111 or 112 with reference to the amino acid positions set forth in SEQ ID NO: 2 or 7. For example, the amino acid positions can be replacements at positions corresponding to replacement of Threonine (T) at position 23 (T23), V24, S25, G26, F27, S28, L29, T30, N31, Y32, G33, V34, H35, W36, V50, I51, W52, S53, G54, G55, N56, T57, D58, Y59, N60, T61, P62, F63, T64, S65, R66, L67, S68, I69, N70, K71, D72, N73, S74, K75, S76, Q77, Y93, Y94, R97, A98, L99, T100, Y101, Y102, D103, E105, F106, A107, Y108, W109, G110, Q111 or G112 with reference to the amino acid positions set forth in SEQ ID NO: 2. In some examples, the amino acid residue that is modified (e.g., replaced) at the position corresponding to any of the above positions is a conservative residue or a semi-conservative amino acid residue to the amino acid set forth in SEQ ID NO: 2 or 7 (see e.g., FIG. 2A or 2B).

[0535] The amino replacement at the position can be replacement to any other amino acid at the position, as long as the resulting modified anti-EGFR antibody or antigen-binding fragment thereof exhibit specific binding to EGFR antigen (e.g., human EGFR). Typically, the resulting anti-EGFR antibody, or antigen-binding fragment thereof, containing a further modification, exhibits greater binding activity under conditions that include acidic pH of from 6.0 to 6.5, inclusive, and/or a lactate concentration of 15 mM to 20 mM, inclusive, compared to under conditions that include neutral pH of or about 7.4 and/or a lactate concentration of or about 1 mM, such that the ratio of binding activity is greater than 1.0, such as greater than 1.2, 1.3, 1.4, 1.5, 1.6, 1.7, 1.8, 1.9, 2.0, 3.0, 4.0, 5.0, 6.0. 7.0, 8.0, 9.0, 10.0, 20.0, 40.0, 30.0, 40.0 or more as described herein above.

[0536] Provided herein are modified anti-EGFR antibodies or antigen-binding fragments thereof containing a variable heavy chain, or portion thereof, with the amino acid replacement 104E and one or more other amino acid replacement(s) corresponding to replacements set forth in Table 6 with reference to positions set forth in SEQ ID NO: 2 or 7.

TABLE 6
Exemplary additional heavy chain amino acid replacements

| | | | | | |
|---|---|---|---|---|---|
| T023K | T030H | G054D | S065P | N073R | T100S |
| T023H | T030R | G054P | S065Q | N073L | T100V |
| T023R | T030D | G054S | S065T | N073A | T100Y |
| T023A | T030G | G055H | S065W | N073C | Y101H |
| T023C | T030I | G055R | S065Y | N073G | Y101E |
| T023E | T030M | G055M | R066L | N073I | Y101F |
| T023G | T030N | G055S | R066A | N073M | Y101M |
| T023I | T030P | G055Y | R066C | N073P | Y101W |
| T023M | T030S | N056K | R066E | N073Q | Y102R |
| T023N | T030V | N056A | R066F | N073S | Y102C |
| T023P | T030W | N056P | R066N | N073T | Y102D |
| T023S | T030Y | N056S | R066P | N073V | Y102I |
| T023V | N031K | N056V | R066Q | N073W | Y102N |
| T023W | N031H | N056G | R066S | N073Y | Y102W |
| T023L | N031D | T057H | R066T | S074K | D103R |
| V024R | N031E | T057R | R066V | S074H | D103L |
| V024A | N031G | T057L | R066G | S074R | D103A |
| V024F | N031I | T057A | L067A | S074L | D103C |
| V024G | N031T | T057C | L067C | S074A | D103I |
| V024I | N031V | T057D | L067D | S074C | D103P |
| V024M | N031L | T057F | L067E | S074D | D103Q |
| V024P | Y032H | T057M | L067I | S074E | D103Y |
| V024S | Y032R | T057N | L067M | S074G | E105H |
| V024T | Y032C | T057Q | L067Q | S074I | E105T |
| V024L | Y032M | T057W | L067S | S074M | F106L |
| V024E | Y032N | T057Y | L067T | S074P | F106V |
| S025H | Y032T | D058L | L067V | S074T | F106W |
| S025R | Y032V | D058G | L067Y | S074V | F106Y |
| S025A | Y032L | D058M | L067G | S074Y | A107K |
| S025C | G033E | D058N | S068K | K075H | A107H |
| S025D | G033M | D058Q | S068H | K075R | A107R |
| S025E | G033S | Y059H | S068R | K075L | A107L |
| S025F | G033T | Y059R | S068L | K075A | A107C |
| S025G | G033Y | Y059A | S068C | K075C | A107D |
| S025I | V034A | Y059C | S068D | K075E | A107E |
| S025M | V034C | Y059D | S068E | K075F | A107G |
| S025P | V034I | Y059E | S068F | K075M | A107N |
| S025Q | V034M | Y059G | S068G | K075Q | A107S |
| S025T | V034P | Y059I | S068I | K075T | A107T |
| S025V | V034L | Y059P | S068N | K075V | A107Y |
| S025L | H035I | Y059Q | S068Q | K075W | Y108K |
| G026H | H035Q | Y059S | S068T | K075Y | Y108H |
| G026R | W036K | Y059T | S068V | K075G | Y108R |
| G026D | W036A | Y059V | I069A | K075P | Y108L |
| G026F | W036I | Y059W | I069C | S076H | Y108C |
| G026M | W036V | N060K | I069G | S076R | Y108F |
| G026N | W036Y | N060A | I069Y | S076L | Y108I |
| G026P | V050K | N060C | N070H | S076A | Y108N |
| G026Q | V050H | N060D | N070R | S076C | Y108S |
| G026S | V050A | N060F | N070L | S076D | Y108T |
| G026Y | V050D | N060G | N070D | S076E | Y108V |
| G026L | V050E | N060P | N070E | S076F | Y108W |
| F027H | V050G | N060Q | N070F | S076M | W109I |
| F027R | V050I | N060S | N070G | S076P | W109M |
| F027A | V050N | N060T | N070I | S076Q | W109Y |
| F027D | V050Q | N060Y | N070P | S076T | G110R |
| F027E | V050T | T061N | N070Q | S076Y | G110A |
| F027G | V050L | T061Q | N070S | S076I | G110M |
| F027M | I051K | P062G | N070T | S076V | G110P |
| F027P | I051H | F063H | N070V | Q077H | G110T |
| F027Q | I051A | F063R | N070Y | Q077R | Q111K |
| F027S | I051C | F063L | K071H | Q077L | Q111H |
| F027T | I051E | F063A | K071R | Q077A | Q111R |
| F027V | I051G | F063C | K071L | Q077E | Q111L |
| F027W | I051N | F063D | K071A | Q077G | Q111D |
| F027Y | I051Q | F063G | K071C | Q077I | Q111E |
| F027L | I051S | F063M | K071F | Q077M | Q111G |
| S028K | I051V | F063N | K071G | Q077N | Q111M |
| S028H | I051Y | F063Q | K071Q | Q077S | Q111P |
| S028R | I051L | F063S | K071S | Q077V | Q111S |
| S028A | W052I | F063V | K071T | Q077W | Q111T |
| S028D | W052N | F063P | K071V | Q077Y | Q111W |
| S028I | W052Y | T064R | K071W | Y093H | Q111Y |
| S028M | S053H | T064L | K071Y | Y093V | Q111V |
| S028P | S053R | T064C | D072K | Y093W | Q111I |
| S028Q | S053A | T064F | D072H | Y094R | G112A |
| S028V | S053C | T064G | D072R | Y094L | G112N |
| S028W | S053G | T064N | D072L | R097H | G112P |
| S028L | S053I | T064Q | D072A | R097W | G112S |
| S028C | S053M | T064V | D072G | A098P | G112T |
| L029K | S053P | S065H | D072I | L099N | G112Y |
| L029H | S053Q | S065R | D072M | L099W | |
| L029A | S053L | S065L | D072N | T100H | |
| L029D | S053T | S065C | D072Q | T100L | |
| L029G | S053V | S065E | D072S | T100A | |
| L029I | S053Y | S065F | D072V | T100D | |
| L029M | G054H | S065G | D072W | T100I | |
| L029N | G054R | S065I | D072Y | T100N | |
| L029S | G054A | S065M | D072P | T100P | |
| L029V | G054C | S065N | N073H | T100Q | |

[0537] For example, modified anti-EGFR antibodies or antigen-binding fragments thereof provided herein contain a variable heavy chain, or portion thereof, having the amino acid replacement 104E and one or more other amino acid replacement(s) at a position or positions corresponding to 24, 25, 27, 28, 29, 30, 31, 32, 50, 53, 54, 58, 59, 63, 64, 67, 68, 72, 73, 74, 75, 76, 77, 97, 100, 101, 107, 111 with reference to positions set forth in any of SEQ ID NO: 2 or 7. For example, the additional replacement(s) can be at positions corresponding to valine (V) at position 24 (V24), S25, F27, S28, L29, T30, N31, Y32, V50, S53, G54, D58, Y59, F63, T64, L67, S68, D72, N73, S74, K75, S76, Q77, R97, T100, Y101, A107, Q111 with reference to the amino acid positions set forth in SEQ ID NO: 2 or 7. For example, exemplary modified anti-EGFR antibodies provided herein contain one or more additional amino acid replacement(s) corresponding to heavy chain replacement(s) V24I, V24L, V24E, S25C, S25G, S25I, S25M, S25V, S25Q, S25T, S25L, S25H, S25R, S25A, S25D, F27R, S28C, L29H, T30F, N31H, N31I, N31T, N31V, Y32T, V50L, S53G, G54D, G54S, G54R, G54C, G54P, D58M, Y59E, F63R, F63C, F63G, F63M, F63V, F63P, F63S, T64N, T64V, L67G, S68F, S68Q, D72K, D72L, D72P, D72M, D72W, N73Q, S74H, S74R, S74D, S74G, S74Y, K75H, K75G, K75W, K75P, S76I, S76V, Q77R, Q77E, R97H, T100I, T100P, Y101W, Y105V, A107N, Q111I, Q111P, and/or Q111V.

[0538] In particular examples, exemplary additional modifications provided herein include modification of a heavy chain variable domain of an anti-EGFR antibody or antigen-binding fragment thereof at position(s) corresponding to positions 24, 25, 27, 30, 53, 72, 97 and 111, with reference to the amino acid positions set forth in SEQ ID NO: 2 or 7. For example, the additional amino acid positions can be replacements at positions corresponding to valine (V) at position 24 (V24), S25, F27, T30, S53, D72, R97 or Q111 with reference to the amino acid positions set forth in SEQ ID NO: 2 or 7. For example, in addition to the replacement 104E, additional amino acid replacements in modified anti-EGFR antibodies provided herein, include, but are not limited to, replacement of a heavy chain residue with: glutamic acid (E) at a position corresponding to 24; C at a position corresponding to 25; V at a position corresponding to position 25; R at a position corresponding to 27; F at a position corresponding to position 30; G at a position corresponding to position 53; L at a position corresponding to position 72; H at a position corresponding to 97; or P at a position corresponding to 111. For example, the modified anti-EGFR antibodies provided herein can contain one or more additional amino acid replacement(s), such as 1, 2, 3, 4, 5, 6, 7, 8 or 9 amino acid replacement(s), corresponding to heavy chain replacements of V24E, S25C, S25V, F27R, T30F, S53G, D72L, R97H or Q111P with reference to the sequence of amino acids set forth in SEQ ID NO: 2 or 7.

[0539] For any of the amino acid replacements in a variable heavy chain provided herein above, it is understood that the replacements can be made in the corresponding position in another anti-EGFR antibody by alignment therewith with the sequence set forth in SEQ ID NO: 2 or 7 (see, e.g., FIG. 2A or 2B), whereby the corresponding position is the aligned position. Hence, the antibody can contain a heavy chain constant region, or portion thereof. In particular examples, the amino acid replacement(s) can be at the corresponding position in a cetuximab heavy chain, or portion thereof, such as set forth in any of SEQ ID NOS: 1, 2, 5, 6, 7, 12, 14 or 16 or a variant thereof having at least 75%, 80%, 81%, 82%, 83%, 84%, 85%, 86%, 86%, 88%, 89%, 90%, 91%, 92%, 93%, 94%, 95%, 96%, 97%, 98%, 99% or more sequence identity thereto. Generally, the modified anti-EGFR antibody exhibits greater binding activity under conditions that include acidic pH of from 6.0 to 6.5, inclusive, and/or a lactate concentration of 15 mM to 20 mM, inclusive, compared to under conditions that include neutral pH of or about 7.4 and/or a lactate concentration of or about 1 mM, such that the ratio of binding activity is greater than 1.0, such as greater than 1.2, 1.3, 1.4, 1.5, 1.6, 1.7, 1.8, 1.9, 2.0, 3.0, 4.0, 5.0, 6.0, 7.0, 8.0, 9.0, 10.0, 20.0, 30.0, 40.0, 50.0 or more.

[0540] Non-limiting amino acid replacements in the heavy chain variable domain of an unmodified anti-EGFR antibody or antigen-binding fragment thereof are set forth in Table 7. The Table sets forth exemplary heavy chain amino acid sequences designated by a SEQ ID NO. Examples of such modified anti-EGFR antibodies containing the modified heavy chain and a light chain are provided below. The modified anti-EGFR, or antigen-binding fragment thereof, can contain further additional modifications in the light chain, for example as described in the following subsection (C.1.a.ii), or as a result of humanization of the antibody as described herein, for example as described in subsection C.2.

TABLE 7
Exemplary Heavy Chain Amino Acid Replacements

| | | Heavy Chain |
|---|---|---|
| | Heavy Chain | Variable Domain |
| Amino Acid Replacements | (SEQ ID NO) | (SEQ ID NO) |
| HC-Y104E/HC-Q111P | 76 | 77, 78 |
| HC-S25C/HC-Y104E | 79 | 80, 81 |
| HC-S53G/HC-Y104E | 82 | 83, 84 |
| HC-S53G/HC-Y104E/HC-Q111P | 85 | 86, 87 |
| HC-S25V/HC-Y104E | 88 | 89, 90 |
| HC-S25V/HC-Y104E/HC-Q111P | 91 | 92, 93 |
| HC-S25V/HC-S53G/HC-Y104E | 94 | 95, 96 |
| HC-S25V/HC-S53G/HC-Y104E/ | 97 | 98, 99 |
| HC-Q111P | | |
| HC-T30F/HC-Y104E | 100 | 101, 102 |
| HC-T30F/HC-Y104E/HC-Q111P | 103 | 104, 105 |
| HC-T30F/HC-S53G/HC-Y104E | 106 | 107, 108 |
| HC-T30F/HC-S53G/HC-Y104E/ | 109 | 110, 111 |
| HC-Q111P | | |
| HC-D72L/HC-Y104E | 112 | 113, 114 |
| HC-D72L/HC-Y104E/HC-Q111P | 115 | 116, 117 |
| HC-S53G/HC-D72L/HC-Y104E | 118 | 119, 120 |
| HC-S53G/HC-D72L/HC-Y104E/ | 121 | 122, 123 |
| HC-Q111P | | |
| HC- F027G/Y104E | 315 | 316, 317 |
| HC- F027G/Y104E/Q111P | 318 | 319, 320 |
| HC- F027G/S053G/Y104E | 321 | 322, 323 |
| HC- F027G/S053G/Y104E/Q111P | 324 | 325, 326 |

### ii. Additional Light Chain Modifications

[0541] Provided herein are modified anti-EGFR antibodies that contain an amino acid replacement of Glu (E) at position 104 (i.e., 104E), and optionally additional modification(s), such as one or more amino acid replacement(s), in a variable light chain of an unmodified anti-EGFR antibody (e.g., cetuximab), antigen-binding fragment thereof, or variant thereof. The resulting modification(s) can be in a variable light chain set forth in any of SEQ ID NOS: 4, 9 or 11, or in a variant thereof, having at least 75%, 80%, 81%, 82%, 83%, 84%, 85%, 86%, 86%, 88%, 89%, 90%, 91%, 92%, 93%, 94%, 95%, 96%, 97%, 98%, 99% or more sequence identity thereto. For example, the resulting modifications can be in an unmodified anti-EGFR antibody containing a variable light chain set forth in SEQ ID NO: 15 or SEQ ID NO: 17, or in a variant thereof, having at least 75%, 80%, 81%, 82%, 83%, 84%, 85%, 86%, 86%, 88%, 89%, 90%, 91%, 92%, 93%, 94%, 95%, 96%, 97%, 98%, 99% or more sequence identity thereto. The modifications also can be in a full-length light chain containing any of the above variable light chains, such as set forth in any of SEQ ID NOS: 3, 8, 10 or 13, or in a variant thereof, having at least 75%, 80%, 81%, 82%, 83%, 84%, 85%, 86%, 86%, 88%, 89%, 90%, 91%, 92%, 93%, 94%, 95%, 96%, 97%, 98%, 99% or more sequence identity thereto. The modification(s) can be in a complementarity determining region (CDR) or in a framework region.

[0542] For example, provided herein are modified anti-EGFR antibodies or antigen-binding fragments thereof a variable heavy chain with the amino acid replacement 104E, and containing at least one amino acid replacement or substitution in the variable light chain, or a portion thereof, at any of positions corresponding to 1, 2, 3, 4, 5, 24, 25, 26, 27, 28, 29, 30, 31, 32, 33, 48, 49, 51, 52, 53, 54, 55, 56, 86, 87, 89, 91, 92, 93, 96, 97, 98, 99 or 100 with reference to the amino acid positions set forth in SEQ ID NO: 4. For example, the amino acid positions can be replacements at positions corresponding to replacement of aspartic acid (D) at position 1 (D1), I2, L3, L4, T5, R24, A25, S26, Q27, S28, I29, G30, T31, N32, 133, 148, K49, A51, S52, E53, S54, I55, S56, Y86, Y87, Q89, N91, N92, N93, T96, T97, F98, G99 or A100 with reference to the amino acid positions set forth in SEQ ID NO: 4. In some examples, the amino acid residue that is modified (e.g., replaced) at the position corresponding to any of the above positions is a conservative residue or a semi-conservative amino acid residue to the amino acid set forth in any of SEQ ID NOS: 4.

[0543] The amino replacement at the position can be replacement to any other amino acid at the position, as long as the resulting modified anti-EGFR antibody or antigen-binding fragment thereof exhibit specific binding to EGFR antigen (e.g., human EGFR). Typically, the resulting anti-EGFR antibody, or antigen-binding fragment thereof, containing a further modification, exhibits greater binding activity under conditions that include acidic pH of from 6.0 to 6.5, inclusive, and/or a lactate concentration of 15 mM to 20 mM, inclusive, compared to under conditions that include neutral pH of or about pH 7.4, and/or a lactate concentration of or about 1 mM, such that the ratio of binding activity is greater than 1.0, such as greater than 1.2, 1.3, 1.4, 1.5, 1.6, 1.7, 1.8, 1.9, 2.0, 3.0, 4.0, 5.0, 6.0. 7.0, 8.0, 9.0, 10.0, 20.0, 40.0, 30.0, 40.0 or more as described herein above.

[0544] Provided herein are modified anti-EGFR antibodies or antigen-binding fragments thereof containing: a variable heavy chain, or portion thereof, with the amino acid replacement 104E; and a variable light chain containing one or more other amino acid replacement(s) in the variable light chain corresponding to replacements set forth in Table 8 with reference to positions set forth in SEQ ID NO: 4.

TABLE 8
Exemplary light chain amino acid replacements

| | | | | | |
|---|---|---|---|---|---|
| D001W | R024M | G030A | K049V | Y087D | T097D |
| I002C | R024S | G030E | K049Y | Y087F | T097G |
| I002V | R024W | G030F | K049L | Y087G | T097Q |
| I002W | R024Y | G030I | K049H | Y087I | T097S |
| L003D | R024G | G030M | K049R | Y087N | T097V |
| L003F | A025C | G030P | A051T | Y087P | T097K |
| L003G | A025G | G030Q | A051L | Y087S | T097R |
| L003S | A025L | G030S | S052A | Y087T | F098A |
| L003T | A025V | G030V | S052C | Y087V | F098M |
| L003V | S026A | G030Y | S052D | Y087W | F098S |
| L003W | S026C | G030L | S052E | Y087K | F098V |
| L003Y | S026D | G030K | S052G | Y087H | F098Y |
| L003R | S026I | G030H | S052I | Y087R | G099L |
| L004C | S026M | G030R | S052M | Q089E | G099D |
| L004E | S026N | T031A | S052Q | N091L | G099E |
| L004F | S026V | T031F | S052V | N091A | G099F |
| L004I | S026W | T031G | S052W | N091C | G099I |
| L004P | S026L | T031M | S052R | N091I | G099M |
| L004S | S026G | T031S | S052K | N091M | G099N |
| L004T | S026H | T031V | E053G | N091S | G099S |
| L004V | S026R | T031W | S054M | N091T | G099T |
| L004W | Q027A | T031L | I055A | N091V | G099V |
| L004K | Q027D | T031K | I055F | N091H | G099K |
| L004H | Q027E | T031H | S056G | N091R | G099H |
| L004R | Q027F | N032G | S056L | N092C | Q100C |
| T005A | Q027I | I033F | S056A | N092D | Q100D |
| T005C | Q027M | I033G | S056C | N092L | Q100E |
| T005D | Q027N | I033M | S056D | N092M | Q100F |
| T005E | Q027P | I033T | S056E | N092S | Q100I |
| T005F | Q027T | I033V | S056F | N092T | Q100M |
| T005G | S028A | I033H | S056N | N092V | Q100N |
| T005N | S028D | I048M | S056P | N092W | Q100P |
| T005S | S028N | I048S | S056Q | N092Y | Q100T |
| T005W | S028Q | I048L | S056V | N092H | Q100V |
| T005L | S028L | I048K | S056W | N092K | Q100W |
| T005K | S028K | K049A | S056H | N092R | Q100Y |
| T005H | S028H | K049E | S056R | N093T | Q100K |
| T005R | I029A | K049F | S056K | T096L | Q100H |
| T005P | I029E | K049G | Y086F | T096C | Q100R |
| R024A | I029F | K049N | Y086M | T096M | |
| R024C | I029S | K049Q | Y086H | T096V | |
| R024F | I029T | K049S | Y087L | T097L | |
| R024L | I029R | K049T | Y087C | T097A | |

[0545] For example, exemplary modified anti-EGFR antibodies or antigen-binding fragments thereof provided herein contain: a variable heavy chain or portion thereof having the amino acid replacement 104E; and a variable light chain or portion thereof having one or more amino acid replacements at a position or positions corresponding to 4, 5, 24, 29, 56 or 91 with reference to positions set forth in any of SEQ ID NO: 4. For example, the amino acid positions can be a replacement(s) at positions corresponding to replacement of leucine (L) at position 4 (L4), T5, R24, I29, S56 or N91 with reference to the amino acid positions set forth in SEQ ID NO: 4. For example, exemplary modified anti-EGFR antibodies provided herein contain one or more amino acid replacements, such as at least 1, 2, 3, 4, 5 or 6 amino acid replacement(s) corresponding to light chain replacement or replacements L4C, L4F, L4V, T5P, R24G, I29S, S56H or N91V. For example, the anti-EGFR antibodies provided herein contain an amino acid replacement corresponding to a light chain replacement of I29S in a sequence of amino acids set forth in SEQ ID NO: 4.

[0546] For any of the amino acid replacements in a variable light chain provided herein above, it is understood that the replacements can be made in the corresponding position in another anti-EGFR antibody by alignment therewith with the sequence set forth in SEQ ID NO: 4, whereby the corresponding position is the aligned position. In particular examples, the amino acid replacement(s) can be at the corresponding position in a cetuximab heavy chain, or portion thereof, such as set forth in in any of SEQ ID NOS: 3, 4, 8-11, 13, 15, or 17, or in a variant thereof, having at least 75%, 80%, 81%, 82%, 83%, 84%, 85%, 86%, 86%, 88%, 89%, 90%, 91%, 92%, 93%, 94%, 95%, 96%, 97%, 98%, 99% or more sequence identity thereto. Generally, the modified anti-EGFR antibody exhibits greater binding activity under conditions that include acidic pH of from 6.0 to 6.5, inclusive, and/or a lactate concentration of 15 mM to 20 mM, inclusive, compared to under conditions that include neutral pH of or about pH 7.4 and/or a lactate concentration of or about 1 mM, such that the ratio of binding activity is greater than 1.0, such as greater than 1.2, 1.3, 1.4, 1.5, 1.6, 1.7, 1.8, 1.9, 2.0, 3.0, 4.0, 5.0, 6.0, 7.0, 8.0, 9.0, 10.0, 20.0, 30.0, 40.0, 50.0 or more.

[0547] Non-limiting amino acid replacements in the variable light chain, in addition to the replacement 104E in the variable heavy chain, of an unmodified anti-EGFR antibody or antigen-binding fragment thereof are set forth in Table 9. The Table sets forth exemplary heavy chain amino acid sequences and light chain amino acid sequences designated by a SEQ ID NO. Examples of such modified anti-EGFR antibodies containing a modified heavy chain and modified light chain are provided below. The modified anti-EGFR, or antigen-binding fragment thereof, can contain further additional modifications in the heavy chain, for example, as described in the subsection above, or as a result of humanization of the antibody as described herein, for example as described in subsection C.2. Further, any of the modification(s) in a heavy chain as described above and any of the modification(s) in a light chain as described herein can be combined in an anti-EGFR antibody, or EGFR-binding fragment thereof.

TABLE 9
Exemplary Heavy Chain and Light Chain
Combined Amino Acid Replacements

| | Heavy Chain | Light Chain |
|---|---|---|
| Amino Acid Replacements | (SEQ ID NO) | (SEQ ID NO) |
| HC-Y104E/LC-I29S | 72, 74, 75 | 124, 125, 126, 127 |
| HC-Y104E/HC-Q111P/LC-I29S | 76, 77, 78 | 124, 125, 126, 127 |

### iii. Other Modifications

[0548] Any of the modified anti-EGFR antibodies provided herein also can contain one or more other additional modifications in the variable region or constant region of the heavy or light chain. Examples of other additional modifications that can be included in the modified anti-EGFR antibodies provided herein include, but are not limited to, those described in U.S. Pat. Nos. 7,657,380, 7,930,107, 7,060,808, 7,723,484, U.S. Pat. Publ. Nos. 20110142822, 2005142133, 2011117110, International Pat. Pub. Nos. WO2012003995, WO2010080463, WO2012020059, WO2008152537, and Lippow et al. (2007) Nat Biotechnol. 25(10):1171-1176. Non-limiting examples of exemplary amino acid modifications described in the art that can be included in any anti-EGFR antibody, or antigen binding fragment thereof, provided herein include:

[0549] variants containing an amino acid replacement (substitution) in the variable light chain (V_{L}) at one or more positions corresponding to replacement of aspartate at position 1 with glutamate (D1E), D1C, I2T, I2C, L3V, L3T, L3C, L4C, T5C, Q6C, S7C, P8C, V9C, V9A, V9D, V9G, V9P, V9S, I10T, I10S, I10F, I10C, L11Q, L11C, S12A, S12C, V13L, V13M, V135, V13A, V13C, S14T, S14C, P15V, P15L, P15C, G16K, G16C, E17D, E17K, E17C, R18V, R18K, R18C, V19A, V19T, V19C, S20T, S20C, S20A, F21I, F21L, F21C, S22T, S22C, R24P, A25V, A25S, A25I, A25P, A25T, A25Y, A25C, A25F, A25M, A25L, A25W, S26D, Q27W, Q27E, Q27F, Q27Y, Q27T, Q27H, S28R, S28F, G30Y, G30C, G30H, G30K, G30Q, G30R, G30W, G30F, G30T, G30M, G305, G30A, T31E, T31V, T31D, T31R, N32H, I33L, H34C, Q38K, R39K, T40P, T40S, N41G, N41D, G42Q, G42K, G42E, S43A, S43P, R45K, K49Y, K49F, Y50G, S53V, S60D, S60A, G64S, G64A, D70E, D70V, F71Y, S74T, N76S, N76T, S77R, S77G, V78L, E79Q, S80P, S80A, E81A, I83F, I183S, I83V, I83A, D85V, D85T, D85I, D85M, Y87S, Q89C, Q89H, Q90C, N91C, N91Q, N91L, N92C, N92L, N92R N92K, N92M, N92Y, N92H, N92E, N92F, N93A, N93D, N93E, N93V, N93K, N93C, W94F, W94Y, P95C, T96C, T96L, T96E, T97C, T97A, T97D, T97E, T97P, T97K, T97N, T97Q, T97I, T97G, T97L, T97H, T97R, T97S, G99A, A100G, A100Q, K103T, L104V and L1061, in the sequence of amino acids set forth in SEQ ID NO: 4;

[0550] variants containing an amino acid replacement (substitution) in the variable heavy chain (V_{H}) at positions corresponding to replacement of glutamine at position 1 with glutamic acid (Q1E), Q1C, V2C, Q3T, Q3C, L4C, K5Q, K5V, K5L, K5C, Q6E, Q6C, S7C, G8C, P9A, P9G, P9C, G10V, G10C, L11C, V12C, Q13K, Q13R, Q13C, P14C, S15G, S15T, S15C, Q16G, Q16R, Q16E, Q16C, S17T, S17C, L18C, S19K, S19R, S19T, S19C, I20L, I20C, T21S, T21C, T23A, T23K, T23C, V24A, V24C, S25C, F27G, S28N, S28T, L29I, T30S, T30K, N31V, N31D, N31I, N31T, N32S, Y32R, Y32W, G33A, G33D, G33E, G33Y, V34L, V34N, V34E, V34Q, V34S, V34W, H35S, V37I, S40A, S40P, P41T, G44A, L48V, L48I, G49S, G49A, V50L, V50Q, V50E, V50I, V50Y, V50N, I51G, I51M, I51S, I51Q, I51A, I51C, I51V, W52F, W52Y, W52G, W52T, S53Q, S53T, S53N, S53Y, G54A, G54V, G54L, G54I, G54S, G55D, G55A, G55E, G55H, G55F, N56A, N56G, N56S, N56T, T57A, T57D, T57G, T57S, T57E, T57P, D58Y, D58N, Y59A, Y59C, Y59E, Y59F, Y59G, Y59S, Y59W, T59H, Y59P, Y59Q, N60D, N60A, T61E, T61P, P62S, F63L, F63V, T64K, T64E, T64A, T64N, T64D, S65G, L67F, L67V, S68T, N70S, N70T, K71V, D72E, N73T, S74A, S76N, Q77T, Q77S, V78L, V78F, V78A, F79Y, F79S, F79V, F80L, F80M, K81Q, K81T, K81E, K81Q, M82L, N83T, N83S, S84N, L85M, L85V, Q86R, Q86D, Q86T, S87A, S87P, N88E, N88V, N88G, N88A, N88D, I92T, I92V, A96C, R97C, A98C, L99C, L99E, T100D, T100C, T100A, Y101C, Y101W, Y101A, Y102C, Y102F, Y102A, Y102W, D103E, D103P, D103C, E105C, E105N, E105D, E105Y, F106C, F106D, F106Y, A107C, A107D, Y108C and Y108F, in the sequence of amino acids set forth in SEQ ID NO: 2 or 7; and

[0551] variants containing amino acid replacement (substitution) in the heavy chain constant regions, for example, in the hinge, C_{H}2 and C_{H}3 regions, including replacement of proline at position 230 with alanine (P230A), E233D, L234D, L234E, L234N, L234Q, L234T, L234H, L234Y, L234I, L234V, L234F, L235D, L235S, L235N, L235Q, L235T, L235H, L235Y, L235I, L235V, L235F, S239D, S239E, S239N, S239Q, S239F, S239T, S239H, S239Y, V240I, V240A, V240T, V240M, F241W, F241L, F241Y, F241E, F241R, F243W, F243L F243Y, F243R, F243Q, P244H, P245A, P247V, P247G, V262I, V262A, V262T, V262E, V263I, V263A, V263T, V263M, V264L, V264I, V264W, V264T, V264R, V264F, V264M, V264Y, V264E, D265G, D265N, D265Q, D265Y, D265F, D265V, D265I, D265L, D265H, D265T, V266I, V266A, V266T, V266M, S267Q, S267L, S267T, S267H, S267D, S267N, E269H, E269Y, E269F, E269R, E269T, E269L, E269N, D270Q, D270T, D270H, E272S, E272K, E272I, E272Y, V273I, K274T, K274E, K274R, K274L, K274Y, F275W, N276S, N276E, N276R, N276L, N276Y, Y278T, Y278E, Y278K, Y278W, E283R, Y296E, Y296Q, Y296D, Y296N, Y296S, Y296T, Y296L, Y296I, Y296H, N297S, N297D, N297E, S298H, T299I, T299L, T299A, T299S, T299V, T299H, T299F, T299E, V302I, W313F, E318R, K320T, K320D, K320I, K322T, K322H, V323I, S324T, S324D, S324R, S324I, S324V, S324L, S324Y, N325Q, N325L, N325I, N325D, N325E, N325A, N325T, N325V, N325H, K326L, K326I, K326T, A327N, A327L, A327D, A327T, L328M, L328D, L328E, L328N, L328Q, L328F, L328I, L328V, L328T, L328H, L328A, P329F, A330L, A330Y, A330V, A330I, A330F, A330R, A330H, A330S, A330W, A330M, P331V, P331H, I332D, I332E, I332N, I332Q, I332T, I332H, I332Y, I332A, E333T, E333H, E333I, E333Y, K334I, K334T, K334F, T335D, T335R, T335Y, D221K, D221Y, K222E, K222Y, T223E, T223K, H224E, H224Y, T225E, T225E, T225K, T225W, P227E, P227K, P227Y, P227G, P228E, P228K, P228Y, P228G, P230E, P230Y, P230G, A231E, A231K, A231Y, A231P, A231G, P232E, P232K, P232Y, P232G, E233N, E233Q, E233K, E233R, E233S, E233T, E233H, E233A, E233V, E233L, E233I, E233F, E233M, E233Y, E233W, E233G, L234K, L234R, L234S, L234A, L234M, L234W, L234P, L234G, L235E, L235K, L235R, L235A, L235M, L235W, L235P, L235G, G236D, G236E, G236N, G236Q, G236K, G236R, G236S, G236T, G236H, G236A, G236V, G236L, G236I, G236F, G236M, G236Y, G236W, G236P, G237D, G237E, G237N, G237Q, G237K, G237R, G237S, G237T, G237H, G237V, G237L, G237I, G237F, G237M, G237Y, G237W, G237P, P238D, P238E, P238N, P238Q, P238K, P238R, P238S, P238T, P238H, P238V, P238L, P238I, P238F, P238M, P238Y, P238W, P238G, S239Q, S239K, S239R, S239V, S239L, S239I, S239M, S239W, S239P, S239G, F241D, F241E, F241Y, F243E, K246D, K246E, K246H, K246Y, D249Q, D249H, D249Y, R255E, R255Y, E258S, E258H, E258Y, T260D, T260E, T260H, T260Y, V262E, V262F, V264D, V264E, V264N, V264Q, V264K, V264R, V264S, V264H, V264W, V264P, V264G, D265Q, D265K, D265R, D265S, D265T, D265H, D265V, D265L, D265I, D265F, D265M, D265Y, D265W, D265P, S267E, S267Q, S267K, S267R, S267V, S267L, S267I, S267F, S267M, S267Y, S267W, S267P, H268D, H268E, H268Q, H268K, H268R, H268T, H268V, H268L, H268I, H268F, H268M, H268W, H268P, H268G, E269K, E269S, E269V, E269I, E269M, E269W, E269P, E269G, D270R, D270S, D270L, D270I, D270F, D270M, D270Y, D270W, D270P, D270G, P271D, P271E, P271N, P271Q, P271K, P271R, P271S, P271T, P271H, P271A, P271V, P271L, P271I, P271F, P271M, P271Y, P271W, P271G, E272D, E272R, E272T, E272H, E272V, E272L, E272F, E272M, E272W, E272P, E272G, K274D, K274N, K274S, K274H, K274V, K274I, K274F, K274M, K274W, K274P, K274G, F275L, N276D, N276T, N276H, N276V, N276I, N276F, N276M, N276W, N276P, N276G, Y278D, Y278N, Y278Q, Y278R, Y278S, Y278H, Y278V, Y278L, Y278I, Y278M, Y278P, Y278G, D280K, D280L, D280W, D280P, D280G, G281D, G281K, G281Y, G281P, V282E, V282K, V282Y, V282P, V282G, E283K, E283H, E283L, E283Y, E283P, E283G, V284E, V284N, V284T, V284L, V284Y, H285D, H285E, H285Q, H285K, H285Y, H285W, N286E, N286Y, N286P, N286G, K288D, K288E, K288Y, K290D, K290N, K290H, K290L, K290W, P291D, P291E, P291Q, P291T, P291H, P291I, P291G, R292D, R292E, R292T, R292Y, E293N, E293R, E293S, E293T, E293H, E293V, E293L, E293I, E293F, E293M, E293Y, E293W, E293P, E293G, E294K, E294R, E294S, E294T, E294H, E294V, E294L, E294I, E294F, E294M, E294Y, E294W, E294P, E294G, Q295D, Q295E, Q295N, Q295R, Q295S, Q295T, Q295H, Q295V, Q295I, Q295F, Q295M, Q295Y, Q295W, Q295P, Q295G, Y296K, Y296R, Y296A, Y296V, Y296M, Y296G, N297Q, N297K, N297R, N297T, N297H, N297V, N297L, N2971, N297F, N297M, N297Y, N297W, N297P, N297G, S298D, S298E, S298Q, S298K, S298R, S2981, S298F, S298M, S298Y, S298W, T299D, T299E, T299N, T299Q, T299K, T299R, T299L, T299F, T299M, T299Y, T299W, T299P, T299G, Y300D, Y300E, Y300N, Y300Q, Y300K, Y300R, Y300S, Y300T, Y300H, Y300A, Y300V, Y300M, Y300W, Y300P, Y300G, R301D, R301E, R301H, R301Y, V303D, V303E, V303Y, S304D, S304N, S304T, S304H, S304L, V305E, V305T, V305Y, K317E, K317Q, E318Q, E318H, E318L, E318Y, K320N, K320S, K320H, K320V, K320L, K320F, K320Y, K320W, K320P, K320G, K322D, K322S, K322V, K322I, K322F, K322Y, K322W, K322P, K322G, S324H, S324F, S324M, S324W, S324P, S324G, N325K, N325R, N325S, N325F, N325M, N325Y, N325W, N325P, N325G, K326P, A327E, A327K, A327R, A327H, A327V, A327I, A327F, A327M, A327Y, A327W, A327P, L328D, L328Q, L328K, L328R, L328S, L328T, L328V, L328I, L328Y, L328W, L328P, L328G, P329D, P329E, P329N, P329Q, P329K, P329R, P329S, P329T, P329H, P329V, P329L, P329I, P329M, P329Y, P329W, P329G, A330E, A330N, A330T, A330P, A330G, P331D, P331Q, P331R, P331T, P331L, P331I, P331F, P331M, P331Y, P331W, I332K, I332R, I332S, I332V, I332F, I332M, I332W, I332P, I332G, E333L, E333F, E333M, E333P, K334P, T335N, T335S, T335H, T335V, T335L, T335I, T335F, T335M, T335W, T335P, T335G, 1336E, I336K, I336Y, S337E, S337N, S337H, S298A, K326A, K326S, K326N, K326Q, K326D, K325E, K326W, K326Y, E333A, E333S, K334A, K334E, Y300I, Y300L, Q295K, E294N, S298N, S298V, S298D, D280H, K290S, D280Q, D280Y, K290G, K290T, K290Y, T250Q, T250E, M428L, M428F, S239D, S239E, S239N, S239Q, S239T, V240I, V240M, V264I, V264T, V264Y, E272Y, K274E, Y278T, N297D, T299A, T299V, T299I, T299H, K326T, L328A, L328H, A330Y, A330L, A330I, I332D, 1332E, I332N, and I332Q, according to EU index numbering.

[0552] b. Exemplary 104E Modified Anti-EGFR Antibodies and Fragments Thereof

[0553] Exemplary modified anti-EGFR antibodies provided herein that contain a replacement of the amino acid corresponding to position 104 with glutamic acid (i.e., 104E) with reference to the heavy chain variable domain set forth in SEQ ID NO: 2 or 7, and optionally one or more further amino acid replacement(s) in the heavy chain or light chain of the antibody, are described below. The modified anti-EGFR antibodies provided herein, such as any described herein, minimally contain a modified variable heavy chain and/or modified variable light chain, or portion thereof sufficient to specifically bind EGFR antigen (e.g., human EGFR) when assembled into an antibody. The 104E-containing anti-EGFR antibodies can exhibit greater binding activity under conditions that include acidic pH of from 6.0 to 6.5, inclusive, and/or a lactate concentration of 15 mM to 20 mM, inclusive, compared to under conditions that include neutral pH of or about 7.4 and/or a lactate concentration of or about 1 mM, such that the ratio of binding activity is greater than 1.0, such as greater than 1.2, 1.3, 1.4, 1.5, 1.6, 1.7, 1.8, 1.9, 2.0, 3.0, 4.0, 5.0, 6.0, 7.0, 8.0, 9.0, 10.0, 20.0, 30.0, 40.0, 50.0 or more.

[0554] For example, provided herein are 104E modified anti-EGFR antibodies containing: i) a modified variable heavy chain set forth in any of SEQ ID NOS: 74, 75, 77, 78, 80, 81, 83, 84, 86, 87, 89, 90, 92, 93, 95, 96, 98, 99, 101, 102, 104, 105, 107, 108, 110, 111, 113, 114, 116, 117, 119, 120, 122, or 123, or a sequence that exhibits at least 75%, 80%, 81%, 82%, 83%, 84%, 85%, 86%, 86%, 88%, 89%, 90%, 91%, 92%, 93%, 94%, 95%, 96%, 97%, 98%, 99% or more sequence identity to any of SEQ ID NOS: 74, 75, 77, 78, 80, 81, 83, 84, 86, 87, 89, 90, 92, 93, 95, 96, 98, 99, 101, 102, 104, 105, 107, 108, 110, 111, 113, 114, 116, 117, 119, 120, 122, 123; and ii) a variable light chain set forth in any of SEQ ID NOS: 4, 9 or 11 or a sequence that exhibits at least 75%, 80%, 81%, 82%, 83%, 84%, 85%, 86%, 86%, 88%, 89%, 90%, 91%, 92%, 93%, 94%, 95%, 96%, 97%, 98%, 99% or more sequence identity to any of SEQ ID NOS: 4, 9, or 11.

[0555] In other examples, provided herein are 104E modified anti-EGFR antibodies containing: i) a variable heavy chain set forth in any of SEQ ID NOS: 74, 75, 77, 78, 80, 81, 83, 84, 86, 87, 89, 90, 92, 93, 95, 96, 98, 99, 101, 102, 104, 105, 107, 108, 110, 111, 113, 114, 116, 117, 119, 120, 122, or 123, or a sequence that exhibits at least 75%, 80%, 81%, 82%, 83%, 84%, 85%, 86%, 86%, 88%, 89%, 90%, 91%, 92%, 93%, 94%, 95%, 96%, 97%, 98%, 99% or more sequence identity to any of SEQ ID NOS: 74, 75, 77, 78, 80, 81, 83, 84, 86, 87, 89, 90, 92, 93, 95, 96, 98, 99, 101, 102, 104, 105, 107, 108, 110, 111, 113, 114, 116, 117, 119, 120, 122, 123; and ii) a variable light chain set forth in any of SEQ ID NOS: 125-127, or a sequence that exhibits at least 75%, 80%, 81%, 82%, 83%, 84%, 85%, 86%, 86%, 88%, 89%, 90%, 91%, 92%, 93%, 94%, 95%, 96%, 97%, 98%, 99% or more sequence identity to any of SEQ ID NOS: 125-127.

[0556] In particular examples, provided herein are 104E modified anti-EGFR antibodies containing: i) a variable heavy chain set forth in SEQ ID NO: 74 or 75 or a sequence that exhibits at least 75%, 80%, 81%, 82%, 83%, 84%, 85%, 86%, 86%, 88%, 89%, 90%, 91%, 92%, 93%, 94%, 95%, 96%, 97%, 98%, 99% or more sequence identity to any of SEQ ID NOS: 74 or 75; and ii) a variable light chain set forth in any of SEQ ID NOS: 125-127, or a sequence that exhibits at least 75%, 80%, 81%, 82%, 83%, 84%, 85%, 86%, 86%, 88%, 89%, 90%, 91%, 92%, 93%, 94%, 95%, 96%, 97%, 98%, 99% or more sequence identity to any of SEQ ID NOS: 125-127.

[0557] In other particular examples, provided herein are 104E modified anti-EGFR antibodies containing additional modifications in both the variable heavy chain and variable light chain, whereby the anti-EGFR antibody contains: i) a variable heavy chain set forth in SEQ ID NO: 77 or 78, or a sequence that at least 75%, 80%, 81%, 82%, 83%, 84%, 85%, 86%, 86%, 88%, 89%, 90%, 91%, 92%, 93%, 94%, 95%, 96%, 97%, 98%, 99% or more sequence identity to any of SEQ ID NOS: 77 or 78; and ii) a variable light chain set forth in any of SEQ ID NOS: 125-127, or a sequence that exhibits at least 75%, 80%, 81%, 82%, 83%, 84%, 85%, 86%, 86%, 88%, 89%, 90%, 91%, 92%, 93%, 94%, 95%, 96%, 97%, 98%, 99% or more sequence identity to any of SEQ ID NOS: 125-127.

[0558] The modified anti-EGFR antibodies provided herein can be full-length IgG1 antibodies, or other subtype from among IgG2, IgG3 or IgG4. For example, the anti-EGFR antibodies can be full-length IgG1 antibodies containing a kappa light chain constant region (set forth in SEQ ID NO: 31 or 33) or an IgG1 heavy chain constant region set forth in any of SEQ ID NOS: 19-23). The heavy chain constant region also can be from an Ig class, such as IgG2 (set forth in SEQ ID NO: 24), IgG3 (set forth in SEQ ID NO: 25) or IgG4 (set forth in SEQ ID NO: 26). The light chain constant region also can be a human lambda light chain (set forth in SEQ ID NO: 32).

[0559] For example, provided herein are modified anti-EGFR antibodies that are full-length antibodies containing: i) a heavy chain variable having the sequence of amino acids set forth in any of SEQ ID NOS: 74, 75, 77, 78, 80, 81, 83, 84, 86, 87, 89, 90, 92, 93, 95, 96, 98, 99, 101, 102, 104, 105, 107, 108, 110, 111, 113, 114, 116, 117, 119, 120, 122, or 123, or a sequence that exhibits at least 75%, 80%, 81%, 82%, 83%, 84%, 85%, 86%, 86%, 88%, 89%, 90%, 91%, 92%, 93%, 94%, 95%, 96%, 97%, 98%, 99% or more sequence identity to any of SEQ ID NOS: 74, 75, 77, 78, 80, 81, 83, 84, 86, 87, 89, 90, 92, 93, 95, 96, 98, 99, 101, 102, 104, 105, 107, 108, 110, 111, 113, 114, 116, 117, 119, 120, 122, or 123 containing the amino acid replacement 104E, and further containing the sequence of amino acids corresponding to an IgG1 constant region set forth in any of SEQ ID NOS: 19-23; and ii) a light chain. The light chain can contain the sequence of amino acids set forth in any of SEQ ID NOS: 4, 9 or 11 or a sequence that exhibits at least 75%, 80%, 81%, 82%, 83%, 84%, 85%, 86%, 86%, 88%, 89%, 90%, 91%, 92%, 93%, 94%, 95%, 96%, 97%, 98%, 99% or more sequence identity to any of SEQ ID NOS: 4, 9, or 11, further containing a kappa light chain constant region set forth in any of SEQ ID NOS: 31, 33 or 34 or a lambda light chain constant region set forth in SEQ ID NO: 32 or variant thereof. For example, the light chain can have the sequence of amino acids set forth in SEQ ID NO: 3, 8, 10 or 13, or a sequence that exhibits at least 75%, 80%, 81%, 82%, 83%, 84%, 85%, 86%, 86%, 88%, 89%, 90%, 91%, 92%, 93%, 94%, 95%, 96%, 97%, 98%, 99% or more sequence identity to any of SEQ ID NOS: 3, 8, 10 or 13. The light chain also can be a modified light chain variable domain having the sequence of amino acids set forth in any of SEQ ID NOS: 125-127, or a sequence that exhibits at least 75%, 80%, 81%, 82%, 83%, 84%, 85%, 86%, 86%, 88%, 89%, 90%, 91%, 92%, 93%, 94%, 95%, 96%, 97%, 98%, 99% or more sequence identity to any of SEQ ID NOS: 125-127, further containing a sequence of amino acids corresponding to a kappa light chain constant region set forth in any of SEQ ID NOS: 31, 33 or 34 or a lambda light chain constant region set forth in SEQ ID NO: 32 or variant thereof.

[0560] In particular, provided herein are modified anti-EGFR antibodies that are full-length antibodies containing: i) a heavy chain set forth in any of SEQ ID NOS: 72, 76, 79, 82, 85, 88, 91, 94, 97, 100, 103, 106, 109, 112, 115, 118, or 121, or a sequence that exhibits at least 75%, 80%, 81%, 82%, 83%, 84%, 85%, 86%, 86%, 88%, 89%, 90%, 91%, 92%, 93%, 94%, 95%, 96%, 97%, 98%, 99% or more sequence identity to any of SEQ ID NOS: 72, 76, 79, 82, 85, 88, 91, 94, 97, 100, 103, 106, 109, 112, 115, 118, or 121 containing the amino acid replacement 104E; and ii) a light chain. The light chain can have the sequence of amino acids set forth any of SEQ ID NOS: 3, 8, 10 or 13, or a sequence that exhibits at least 75%, 80%, 81%, 82%, 83%, 84%, 85%, 86%, 86%, 88%, 89%, 90%, 91%, 92%, 93%, 94%, 95%, 96%, 97%, 98%, 99% or more sequence identity to any of SEQ ID NOS: 3, 8, 10 or 13. The light chain also can have the sequence of amino acids set forth in SEQ ID NO: 124, or a sequence that exhibits at least 75%, 80%, 81%, 82%, 83%, 84%, 85%, 86%, 86%, 88%, 89%, 90%, 91%, 92%, 93%, 94%, 95%, 96%, 97%, 98%, 99% or more sequence identity to SEQ ID NO: 124.

[0561] Modified anti-EGFR antibodies provided herein also include antibody fragments, which are derivatives of full-length antibodies that contain less than the full sequence of the full-length antibodies but retain at least a portion of the specific binding abilities of the full-length antibody, such as the variable portions of the heavy and light chain. The antibody fragments also can include antigen-binding portions of an antibody that can be inserted into an antibody framework (e.g., chimeric antibodies) in order to retain the binding affinity of the parent antibody. Examples of antibody fragments include, but are not limited to, Fab, Fab′, F(ab′)₂, single-chain Fv (scFv), Fv, dsFv, diabody, Fd and Fd′ fragments, and other fragments, including modified fragments (see, for example, Methods in Molecular Biology, Vol. 207: Recombinant Antibodies for Cancer Therapy Methods and Protocols (2003); Chapter 1; p 3-25, Kipriyanov).

[0562] Antibody fragments can include multiple chains linked together, such as by disulfide bridges and can be produced recombinantly. Antibody fragments also can contain synthetic linkers, such as peptide linkers, to link two or more domains. Methods for generating antigen-binding fragments are well-known known in the art and can be used to modify any antibody provided herein. Fragments of antibody molecules can be generated, such as for example, by enzymatic cleavage. For example, upon protease cleavage by papain, a dimer of the heavy chain constant regions, the Fc domain, is cleaved from the two Fab regions (i.e., the portions containing the variable regions). Alternatively, pepsin cleavage can be used to prepare divalent F(ab′)₂ fragments of an antibody. Antibody fragments also can be generated synthetically or by recombinant DNA methods.

[0563] Single chain antibodies can be recombinantly engineered by joining a heavy chain variable region (V_{H}) and light chain variable region (V_{L}) of a specific antibody. The particular nucleic acid sequences for the variable regions can be cloned by standard molecular biology methods, such as, for example, by polymerase chain reaction (PCR) and other recombination nucleic acid technologies. Methods for producing scFvs are described, for example, by Whitlow and Filpula (1991) Methods, 2: 97-105; Bird et al. (1988) Science 242:423-426; Pack et al. (1993) Bio/Technology 11:1271-77; and U.S. Pat. Nos. 4,946,778, 5,840,300, 5,667,988, 5,658,727, 5,258,498).

[0564] Fragments of modified anti-EGFR antibodies provided herein, such as any described herein above, contain: i) a modified variable heavy chain set forth in any of SEQ ID NOS: 74, 75, 77, 78, 80, 81, 83, 84, 86, 87, 89, 90, 92, 93, 95, 96, 98, 99, 101, 102, 104, 105, 107, 108, 110, 111, 113, 114, 116, 117, 119, 120, 122, or 123, or an antigen-binding fragment or variant thereof that exhibits a sequence identity of at least 75%, 80%, 81%, 82%, 83%, 84%, 85%, 86%, 86%, 88%, 89%, 90%, 91%, 92%, 93%, 94%, 95%, 96%, 97%, 98%, 99% or more to any of SEQ ID NOS: 74, 75, 77, 78, 80, 81, 83, 84, 86, 87, 89, 90, 92, 93, 95, 96, 98, 99, 101, 102, 104, 105, 107, 108, 110, 111, 113, 114, 116, 117, 119, 120, 122, 123, or 125-127 and contains the amino acid replacement 104E; and ii) a variable light chain heavy domain set forth in any of SEQ ID NOS: 4, 9, 11, 15, 17 or 125-127, or an antigen-binding fragment or variant thereof that exhibits a sequence identity of at least 75%, 80%, 81%, 82%, 83%, 84%, 85%, 86%, 86%, 88%, 89%, 90%, 91%, 92%, 93%, 94%, 95%, 96%, 97%, 98%, 99% or more to any of SEQ ID NOS: 4, 9, 11, 15, 17 or 125-127. For example, examples of antibody fragments include, but are not limited to, Fab, Fab′, F(ab′)₂, single-chain Fv (scFv), Fv, dsFv, diabody, Fd and Fd′ fragments.

[0565] For example, such anti-EGFR antibodies can be Fab fragments (VH-CH1 and CL-CL). In such examples, the 104E variable heavy chain regions described above can further contain a heavy chain C_{H}1 constant region from an IgG1 (e.g., corresponding to amino acid residues 1-98 of any of SEQ ID NOS: 19-23) or other subtype or isotype (e.g., corresponding to amino acid residues 1-98 of any of SEQ ID NOS: 24-27). The variable light chain regions described above can further contain a kappa light chain constant region set forth in any of SEQ ID NOS: 31, 33 or 34 or a lambda light chain constant region set forth in SEQ ID NO: 32. For example, provided herein, are modified anti-EGFR Fab antibodies containing: i) a variable heavy chain set forth in any of SEQ ID NOS: 74, 75, 77, 78, 80, 81, 83, 84, 86, 87, 89, 90, 92, 93, 95, 96, 98, 99, 101, 102, 104, 105, 107, 108, 110, 111, 113, 114, 116, 117, 119, 120, 122, or 123, or a sequence that exhibits at least 75%, 80%, 81%, 82%, 83%, 84%, 85%, 86%, 86%, 88%, 89%, 90%, 91%, 92%, 93%, 94%, 95%, 96%, 97%, 98%, 99% or more sequence identity to any of SEQ ID NOS: 74, 75, 77, 78, 80, 81, 83, 84, 86, 87, 89, 90, 92, 93, 95, 96, 98, 99, 101, 102, 104, 105, 107, 108, 110, 111, 113, 114, 116, 117, 119, 120, 122, or 123 containing the amino acid replacement 104E, and further containing the sequence of amino acids corresponding amino acids 1-98 of an IgG1 constant region set forth in any of SEQ ID NOS: 19-23 or variant thereof; and ii) a light chain having the sequence of amino acids set forth any of SEQ ID NOS: 3, 8, 10, 13 or 124, or a sequence that exhibits at least 75%, 80%, 81%, 82%, 83%, 84%, 85%, 86%, 86%, 88%, 89%, 90%, 91%, 92%, 93%, 94%, 95%, 96%, 97%, 98%, 99% or more sequence identity to any of SEQ ID NOS: 3, 8, 10, 13 or 124.

[0566] In particular examples, the modified anti-EGFR antibody is a single chain antibody. A single chain antibody can be generated from the antigen-binding domain of any of the anti-EGFR antibodies provided herein. Methods for generating single chain antibodies using recombinant techniques are known in the art, such as those described in, for example, Marasco et al. (1993) Proc. Natl. Acad. Sci. USA 90:7889-7893, Whitlow and Filpula (1991) Methods, 2: 97-105; Bird et al. (1988) Science 242:423-426; Pack et al. (1993) Bio/Technology 11:1271-77; and U.S. Pat. Nos. 4,946,778, 5,840,300, 5,667,988, 5,658,727.

[0567] A single chain antibody can contain a light chain variable (V_{L}) domain or functional region thereof and a heavy chain variable (V_{H}) domain or functional region thereof of any anti-EGFR antibody or antigen-binding fragment thereof provided herein. In some examples, the V_{L} domain or functional region thereof of the single chain antibody contains a complementarity determining region 1 (CDR1), a complementarity determining region 2 (CDR2) and/or a complementarity determining region 3 (CDR3) of an anti-EGFR antibody, or antigen-binding fragment thereof, provided herein. In some examples, the V_{H} domain, or functional region thereof, of the single chain antibody contains a complementarity determining region 1 (CDR1), a complementarity determining region 2 (CDR2) and a complementarity determining region 3 (CDR3) of any anti-EGFR antibody, or antigen-binding fragment thereof, provided herein.

[0568] In some examples, the single chain antibody further contains a peptide linker. In such examples, a peptide linker can be located between the light chain variable domain (V_{L}) and the heavy chain variable domain (V_{H}). The single chain antibody can contain a peptide spacer, or linker, between the one or more domains of the antibody. For example, the light chain variable domain (V_{L}) of an antibody can be coupled to a heavy chain variable domain (V_{H}) via a flexible linker peptide. Generally, linker peptides are approximately 1-50 amino acids in length. The linkers used herein also can increase intracellular availability, serum stability, specificity and solubility or provide increased flexibility or relieve steric hindrance. Linking moieties are described, for example, in Huston et al. (1988) Proc Natl Acad Sci USA 85:5879-5883, Whitlow et al. (1993) Protein Engineering 6:989-995, and Newton et al., (1996) Biochemistry 35:545-553.

[0569] Various peptide linkers are well-known in the art and can be employed in the provided methods. A peptide linker can include a series of glycine residues (Gly) or Serine (Ser) residues. Exemplary polypeptide linkers are peptides having the amino acid sequences (Gly-Ser)ₙ, (GlyₘSer)ₙ or (SerₘGly)ₙ, in which m is 1 to 6, generally 1 to 4, and typically 2 to 4, and n is 1 to 30, or 1 to 10, and typically 1 to 4, with some glutamic acid (Glu) or lysine (Lys) residues dispersed throughout to increase solubility (see, e.g., International PCT application No. WO 96/06641, which provides exemplary linkers for use in conjugates). Exemplary peptide linkers include, but are not limited to peptides having the sequence (Gly₄Ser)₃ (SEQ ID NO: 46), GGSSRSSSSGGGGSGGGG (SEQ ID NO: 327), GSGRSGGGGSGGGGS (SEQ ID NO: 328), EGKSSGSGSESKST (SEQ ID NO: 329), EGKSSGSGSESKSTQ (SEQ ID NO: 330), EGKSSGSGSESKVD (SEQ ID NO: 331), GSTSGSGKSSEGKG (SEQ ID NO: 332), KESGSVSSEQLAQFRSLD (SEQ ID NO: 333), and ESGSVSSEELAFRSLD (SEQ ID NO: 334). Other suitable peptide linkers include any of those described in U.S. Pat. No. 4,751,180 or 4,935,233, which are hereby incorporated by reference.

[0570] 2. Humanized Anti-EGFR Antibodies

[0571] Provided herein are human or humanized anti-EGFR antibodies. For example, any modified anti-EGFR containing a modified heavy chain and/or modified light chain as provided in subsection C.1 above, can be humanized. For example, humanization can be performed with reference to any of the anti-EGFR antibodies provided herein that contain a variable heavy chain set forth in SEQ ID NOS: 74, 75, 77, 78, 80, 81, 83, 84, 86, 87, 89, 90, 92, 93, 95, 96, 98, 99, 101, 102, 104, 105, 107, 108, 110, 111, 113, 114, 116, 117, 119, 120, 122, or 123 or a sequence that exhibits at least 75%, 80%, 81%, 82%, 83%, 84%, 85%, 86%, 86%, 88%, 89%, 90%, 91%, 92%, 93%, 94%, 95%, 96%, 97%, 98%, 99% or more sequence identity to any of SEQ ID NOS: 74, 75, 77, 78, 80, 81, 83, 84, 86, 87, 89, 90, 92, 93, 95, 96, 98, 99, 101, 102, 104, 105, 107, 108, 110, 111, 113, 114, 116, 117, 119, 120, 122, or 123, and that contain 104E; and a variable light chain set forth in any of SEQ ID NOS: 4, 9, 11 or 124-127, or a sequence that exhibits at least 75%, 80%, 81%, 82%, 83%, 84%, 85%, 86%, 86%, 88%, 89%, 90%, 91%, 92%, 93%, 94%, 95%, 96%, 97%, 98%, 99% to any of SEQ ID NOS: 4, 9, 11 or 124-127, including any of the exemplary antibodies described above. Methods of humanization are well-known to the skilled artisan. Antibody humanization can be used to evolve mouse or other non-human antibodies into human antibodies. The resulting antibody contains an increase in human sequence and a reduction to an elimination of non-human (e.g., mouse) antibody sequence, while maintaining similar binding affinity and specificity as the starting antibody.

[0572] Methods for engineering or humanizing non-human or human antibodies can be used and are well-known in the art. Generally, a humanized or engineered antibody has one or more amino acid residues from a source which is non-human, e.g., but not limited to, mouse, rat, rabbit, non-human primate or other mammal. The human amino acid residues are imported thereto, and hence are often referred to as “import” residues, which are typically taken from an “import” variable, constant or other domain of a known human sequence. Known human Ig sequences are disclosed, e.g., ncbi.nlm nih.gov/entrez/query.fcgi; atcc.org/phage/hdb.html; sciquest.com/; www.abcam.com/; antibodyresource.com/onlinecomp.html; public.iastate.edu/.about.pedro/research_tools.html; mgen.uni-heidelberg.de/SD/IT/IT.html; whfreeman.com/immunology/CH05/kuby05.htm; library.thinkquest.org/12429/Immune/Antibody.html; hhmi.org/grants/lectures/1996/vlab/; path.cam.ac.uk/.about.mrc7/mikeimages.html; antibodyresource.com/; mcb.harvard.edu/BioLinks/Immunology.html.immunologylink.com/; pathbox.wustl.edu/.about.hcenter/index.html; biotech.ufl.edu/.about.hcl/; www.pebio.com/pa/340913/340913.html; nal.usda.gov/awic/pubs/antibody/; m.chime-u.ac.p/.about.yasuhito/Elisa.html; biodesign.com/table.asp; icnet.uk/axp/facs/davies/links.html; biotech.ufl.edu/.about.fccl/protocol.html; isac-net.org/sites_geo.html; aximtl.imt.uni-marburg.de/.about.rek/AEPStart.html; baserv.uci.kun.nLabout.jraats/linksl.html; recab.uni-hd.de/immuno bme.nwvu.edu/; mrc-cpe.cam.ac.uk/imt-doc/public/INTRO.html; ibt.unam.mx/vir/V_mice.html; imgt.cnusc.fr:8104/; biochem.ucl.ac.uk/.about.martin/abs/index.html; antibody.bath.ac.uk/; abgen.cvm.tamu.edu/lab/wwwabgen.html; unizh.ch/.about.honegger/AHOseminar/Slide01.html; www.cryst.bbk.ac.uk/.about.ubcg07s/; nimr mrc.ac.uk/CC/ccaewg/ccaewg.htm; path.cam.ac.uk/.about.mrc7/humanisation/TAHHP.html; ibt.unam.mx/vir/structure/sta_taim.html; biosci.missouri.edu/smithgp/index.html; cryst.bioc.cam.ac.uk/.about.fmolina/Web-pages/Pept/spottech.html; jerini.de/frproducts.htm; patents.ibm.con/ibm.html; Kabat et al. Sequences of Proteins of Immunological Interest, U.S. Dept. Health (1983). Such imported sequences can be used to reduce immunogenicity or reduce, enhance or modify binding, affinity, on-rate, off-rate, avidity, specificity, half-life, or any other suitable characteristic, as known in the art. Generally part or all of the original non-human or human CDR sequences are maintained while the non-human sequences of the variable regions (e.g., framework regions) and constant regions are replaced with human sequences or other amino acids.

[0573] Antibodies also can optionally be humanized with retention of high affinity for the antigen and other favorable biological properties. To achieve this goal, humanized antibodies can be optionally prepared by a process of analysis of the parental sequences and various conceptual humanized products using three-dimensional models of the parental and humanized sequences. Three-dimensional immunoglobulin models are commonly available and are familiar to those skilled in the art. Computer programs are available which illustrate and display probable three-dimensional conformational structures of selected candidate immunoglobulin sequences. Inspection of these displays permits analysis of the likely role of the residues in the functioning of the candidate immunoglobulin sequence, i.e., the analysis of residues that influence the ability of the candidate immunoglobulin to bind its antigen. In this way, FR residues can be selected and combined from the consensus and import sequences so that the desired antibody characteristic, such as increased affinity for the target antigen(s), is achieved.

[0574] In general, the CDR residues are directly and most substantially involved in influencing antigen binding. Hence, the CDR residues are not generally targeted for humanization. Humanization or engineering of antibodies can be performed using any known method, such as but not limited to, those described in Jones et al., Nature 321:522 (1986); Riechmann et al., Nature 332:323 (1988); Verhoeyen et al., Science 239:1534 (1988)), Sims et al., J. Immunol. 151: 2296 (1993); Chothia and Lesk, J. Mol. Biol. 196:901 (1987), Carter et al., Proc. Natl. Acad. Sci. U.S.A. 89:4285 (1992); Presta et al., J. Immunol. 151:2623 (1993), U.S. Pat. Nos. 5,723,323, 5,976,862, 5,824,514, 5,817,483, 5,814,476, 5,763,192, 5,723,323, 5,766,886, 5,714,352, 6,204,023, 6,180,370, 5,693,762, 5,530,101, 5,585,089, 5,225,539; 4,816,567, PCT/: US98/16280, US96/18978, US91/09630, US91/05939, US94/01234, GB89/01344, GB91/01134, GB92/01755; WO90/14443, WO90/14424, WO90/14430, EP 229246, each entirely incorporated herein by reference, including references cited therein.

[0575] For example, antibody humanization can be performed, for example, by synthesizing a combinatorial library containing the six CDRs of a target antibody to be humanized (e.g., the CDRs of any of the modified anti-EGFR antibodies set forth above) fused in frame to a pool of individual human frameworks. For example, the CDRs can be derived from any one or more of the CDRH1 (amino acid residues 26-35, according to AbM definition, or amino acid residues 31-35, according to Kabat definition), CDRH2 (amino acid residues 50-65) or CDRH3 (amino acid residues 95-102) set forth in any of SEQ ID NOS: 74, 75, 77, 78, 80, 81, 83, 84, 86, 87, 89, 90, 92, 93, 95, 96, 98, 99, 101, 102, 104, 105, 107, 108, 110, 111, 113, 114, 116, 117, 119, 120, 122, or 123 and/or can be derived from any one or more of the CDRL1 (amino acid residues 24-34), CDRL2 (amino acid residues 50-56) or CDRL3 (amino acid residues 89-97) set forth in any of SEQ ID NOS: 4, 9, 11 or 125-127. A human framework library that contains genes representative of all known heavy and light chain human germline genes can be utilized. The resulting combinatorial libraries can then be screened for conditional binding to antigens of interest as described herein. This approach can allow for the selection of the most favorable combinations of fully human frameworks in terms of maintaining the affinity and conditional binding activity of the parental antibody. Humanized antibodies can then be further optimized by a variety of techniques.

[0576] The number of amino acid substitutions or replacements a skilled artisan can make to effect humanization depends on many factors, including those described above. In general, the number of amino acid replacements (substitutions), insertions or deletions for an anti-EGFR antibody, fragment or variant will not be more than 40, 30, 20, 19, 18, 17, 16, 15, 14, 13, 12, 11, 10, 9, 8, 7, 6, 5, 4, 3, 2, 1, such as 1-30 or any range or value therein, as specified herein Amino acids in an anti-EGFR antibody that are essential for function can be identified by methods known in the art, such as site-directed mutagenesis or alanine-scanning mutagenesis (e.g., Ausubel, supra, Chapters 8, 15; Cunningham and Wells, Science 244:1081-1085 (1989)). The latter procedure introduces single alanine mutations at every residue in the molecule. The resulting mutant molecules are then tested for biological activity, such as, but not limited to binding to EGFR using any of the methods described herein. Sites that are critical for antibody binding can also be identified by structural analysis such as crystallization, nuclear magnetic resonance or photoaffinity labeling (Smith, et al., J. Mol. Biol. 224:899-904 (1992) and de Vos, et al., Science 255:306-312 (1992)).

[0577] Humanized antibodies provided herein also can be generated based on a known humanized backbone or reference anti-EGFR antibody. For example, the known humanized antibodies H225 (VH set forth in SEQ ID NO: 14 and VL set forth in SEQ ID NO: 15) or Hu225 (VH set forth in SEQ ID NO: 16 or VL set forth in SEQ ID NO: 17) can be used as an unmodified or reference anti-EGFR antibody into which the 104E amino acid replacement, and optionally one or more other amino acid replacement(s), is/are introduced. For example, humanized Cetuximab anti-EGFR antibodies, for example H225, with a variable heavy chain set forth in SEQ ID NO: 14 and a variable light chain set forth in SEQ ID NO: 15, and Hu225, with a variable heavy chain set forth in SEQ ID NO: 16 and a variable light chain set forth in SEQ ID NO: 17, can be modified by site directed mutagenesis to yield a humanized 104E (E-h) antibody and variants thereof.

[0578] In other cases, any of the humanized anti-EGFR antibodies described in U.S. patent application Ser. No. 13/815,553 can be used as an unmodified or reference anti-EGFR antibody into which the 104E amino acid replacement, and optionally one or more other amino acid replacement(s), is/are introduced. Humanized antibodies that can be used as an unmodified or reference anti-EGFR antibody include, but are not limited to, any of the humanized antibodies containing the amino acid replacement 104D set forth in Table 11 (e.g., designated DP-h1-h10, DP-h12-h14 or FDP-h1-h21). For example, exemplary humanized reference or backbone antibodies are the anti-EGFR antibody designated Y104D/Q111P (DP-h07) (e.g., having a heavy chain set forth in SEQ ID NO: 55 and light chain set forth in SEQ ID NO: 181) or the anti-EGFR antibody designated T030F/Y104D/Q111P (FDP-h03) (e.g., having a heavy chain set forth in SEQ ID NO: 65 and light chain set forth in SEQ ID NO: 258) or the anti-EGFR antibody designated Y104D (D-h07) (e.g., having a heavy chain set forth in SEQ ID NO: 57 and a light chain set forth in SEQ ID NO: 181). Any of such unmodified or reference humanized sequences can be subjected to site directed mutagenesis to generate humanized anti-EGFR antibodies containing the amino acid replacement 104E, and optionally one or more other amino acid replacement.

[0579] Non-limiting examples of 104E humanized clones are set forth in Table 10, which sets forth the SEQ ID NO of the heavy and light chains of each clone.

TABLE 10
Exemplary Humanized 104E Clones

| | HEAVY CHAIN | | | | | | LIGHT CHAIN | | | | | | |
|---|---|---|---|---|---|---|---|---|---|---|---|---|---|
| | | | Variable | | Variable | | | | Variable | | Variable | Variable | |
| | Full length | | region^{a} | | region^{b} | | Full length | | region^{c} | | region^{d} | region^{e} | |
| | nucleic | amino | nucleic | amino | nucleic | amino | nucleic | amino | nucleic | amino | amino | nucleic | amino |
| | acid | acid | acid | acid | acid | acid | acid | acid | acid | acid | acid | acid | acid |
| cetuximab | 48 | 6 | 49 | 7 | | 2 | 50 | 8 | 51 | 9 | 4 | | 11 |
| E-h07 | 58 | 59 | 60 | 61 | 62 | 63 | 180 | 181 | 182 | 183 | 184 | 185 | 186 |
| EP-h01 | 128 | 129 | 130 | 131 | 132 | 133 | 152 | 153 | 154 | 155 | 156 | 157 | 158 |
| EP-h02 | 128 | 129 | 130 | 131 | 132 | 133 | 159 | 160 | 161 | 162 | 163 | 164 | 165 |
| EP-h03 | 134 | 135 | 136 | 137 | 138 | 139 | 152 | 153 | 154 | 155 | 156 | 157 | 158 |
| EP-h04 | 128 | 129 | 130 | 131 | 132 | 133 | 166 | 167 | 168 | 169 | 170 | 171 | 172 |
| EP-h05 | 128 | 129 | 130 | 131 | 132 | 133 | 173 | 174 | 175 | 176 | 177 | 178 | 179 |
| EP-h06 | 128 | 129 | 130 | 131 | 132 | 133 | 180 | 181 | 182 | 183 | 184 | 185 | 186 |
| EP-h07 | 134 | 135 | 136 | 137 | 138 | 139 | 180 | 181 | 182 | 183 | 184 | 185 | 186 |
| EP-h08 | 128 | 129 | 130 | 131 | 132 | 133 | 187 | 188 | 189 | 190 | 191 | 192 | 193 |
| EP-h09 | 140 | 141 | 142 | 143 | 144 | 145 | 180 | 181 | 182 | 183 | 184 | 185 | 186 |
| EP-h10 | 146 | 147 | 148 | 149 | 150 | 151 | 194 | 195 | 196 | 197 | 198 | 199 | 200 |
| EP-h12 | 140 | 141 | 142 | 143 | 144 | 145 | 194 | 195 | 196 | 197 | 198 | 199 | 200 |
| EP-h13 | 146 | 147 | 148 | 149 | 150 | 151 | 201 | 202 | 203 | 204 | 205 | 206 | 207 |
| EP-h14 | 140 | 141 | 142 | 143 | 144 | 145 | 201 | 202 | 203 | 204 | 205 | 206 | 207 |
| FEP-h01 | 208 | 209 | 210 | 211 | 212 | 213 | 250 | 251 | 252 | 253 | 254 | 255 | 256 |
| FEP-h02 | 214 | 215 | 216 | 217 | 218 | 219 | 250 | 251 | 252 | 253 | 254 | 255 | 256 |
| FEP-h03 | 220 | 221 | 222 | 223 | 224 | 225 | 257 | 258 | 259 | 260 | 261 | 262 | 263 |
| FEP-h04 | 226 | 227 | 228 | 229 | 230 | 231 | 257 | 258 | 259 | 260 | 261 | 262 | 263 |
| FEP-h05 | 232 | 233 | 234 | 235 | 236 | 237 | 264 | 265 | 266 | 267 | 268 | 269 | 270 |
| FEP-h06 | 238 | 239 | 240 | 241 | 242 | 243 | 271 | 272 | 273 | 274 | 275 | 276 | 277 |
| FEP-h07 | 220 | 221 | 222 | 223 | 224 | 225 | 271 | 272 | 273 | 274 | 275 | 276 | 277 |
| FEP-h08 | 226 | 227 | 228 | 229 | 230 | 231 | 271 | 272 | 273 | 274 | 275 | 276 | 277 |
| FEP-h09 | 232 | 233 | 234 | 235 | 236 | 237 | 278 | 279 | 280 | 281 | 282 | 283 | 284 |
| FEP-h10 | 244 | 245 | 246 | 247 | 248 | 249 | 278 | 279 | 280 | 281 | 282 | 283 | 284 |
| FEP-h11 | 220 | 221 | 222 | 223 | 224 | 225 | 278 | 279 | 280 | 281 | 282 | 283 | 284 |
| FEP-h12 | 226 | 227 | 228 | 229 | 230 | 231 | 278 | 279 | 280 | 281 | 282 | 283 | 284 |
| FEP-h13 | 232 | 233 | 234 | 235 | 236 | 237 | 285 | 286 | 287 | 288 | 289 | 290 | 291 |
| FEP-h14 | 244 | 245 | 246 | 247 | 248 | 249 | 285 | 286 | 287 | 288 | 289 | 290 | 291 |
| FEP-h15 | 220 | 221 | 222 | 223 | 224 | 225 | 285 | 286 | 287 | 288 | 289 | 290 | 291 |
| FEP-h16 | 226 | 227 | 228 | 229 | 230 | 231 | 285 | 286 | 287 | 288 | 289 | 290 | 291 |
| FEP-h17 | 232 | 233 | 234 | 235 | 236 | 237 | 292 | 293 | 294 | 295 | 296 | 297 | 298 |
| FEP-h18 | 244 | 245 | 246 | 247 | 248 | 249 | 299 | 300 | 301 | 302 | 303 | 304 | 305 |
| FEP-h19 | 208 | 209 | 210 | 211 | 212 | 213 | 299 | 300 | 301 | 302 | 303 | 304 | 305 |
| FEP-h20 | 208 | 209 | 210 | 211 | 212 | 213 | 278 | 279 | 280 | 281 | 282 | 283 | 284 |
| FEP-h21 | 208 | 209 | 210 | 211 | 212 | 213 | 285 | 286 | 287 | 288 | 289 | 290 | 291 |

Variable region^{a-b}: derived from known cetuximab heavy chain variable region (see Section B)
Variable region^{c-e}: derived from known cetuximab light chain variable region (see Section B)

[0580] Exemplary humanized anti-EGFR antibodies provided herein include any containing a variable heavy chain (VH) and variable light chain (VL) having a sequence of amino acids set forth as:

[0581] the VH set forth in SEQ ID NO: 61 or 63 or a sequence of amino acids that exhibits at least 85% sequence identity to SEQ ID NO: 61 or 63, and the VL set forth in SEQ ID NO: 183, 184 or 186 or a sequence of amino acids that exhibits at least 85% sequence identity to SEQ ID NO: 183, 184 or 186;

[0582] the VH set forth in SEQ ID NO: 131 or 133 or a sequence of amino acids that exhibits at least 85% sequence identity to SEQ ID NO: 131 or 133, and the VL set forth in SEQ ID NO: 155, 156 or 158 or a sequence of amino acids that exhibits at least 85% sequence identity to SEQ ID NO: 155, 156 or 158;

[0583] the VH set forth in SEQ ID NO: 131 or 133 or a sequence of amino acids that exhibits at least 85% sequence identity to SEQ ID NO: 131 or 133, and the VL set forth in SEQ ID NO: 162, 163 or 165 or a sequence of amino acids that exhibits at least 85% sequence identity to SEQ ID NO: 162, 163 or 165;

[0584] the VH set forth in SEQ ID NO: 137 or 139 or a sequence of amino acids that exhibits at least 85% sequence identity to SEQ ID NO: 137 or 139, and the VL set forth in SEQ ID NO: 155, 156 or 158 or a sequence of amino acids that exhibits at least 85% sequence identity to SEQ ID NO: 155, 156 or 158;

[0585] the VH set forth in SEQ ID NO: 131 or 133 or a sequence of amino acids that exhibits at least 85% sequence identity to SEQ ID NO: 131 or 133, and the VL set forth in SEQ ID NO: 169, 170 or 172 or a sequence of amino acids that exhibits at least 85% sequence identity to SEQ ID NO: 169, 170 or 172;

[0586] the VH set forth in SEQ ID NO: 131 or 133 or a sequence of amino acids that exhibits at least 85% sequence identity to SEQ ID NO: 131, and the VL set forth in SEQ ID NO: 176, 177 or 179 or a sequence of amino acids that exhibits at least 85% sequence identity to SEQ ID NO: 176, 177 or 179;

[0587] the VH set forth in SEQ ID NO: 131 or 133 or a sequence of amino acids that exhibits at least 85% sequence identity to SEQ ID NO: 131 or 133 and the VL set forth in SEQ ID NO: 183, 184 or 186 or a sequence of amino acids that exhibits at least 85% sequence identity to SEQ ID NO: 183, 184 or 186;

[0588] the VH set forth in SEQ ID NO: 137 or 139 or a sequence of amino acids that exhibits at least 85% sequence identity to SEQ ID NO: 137 or 139, and the VL set forth in SEQ ID NO: 183, 184 or 186 or a sequence of amino acids that exhibits at least 85% sequence identity to SEQ ID NO: 183, 184 or 186;

[0589] the VH set forth in SEQ ID NO: 131 or 133 or a sequence of amino acids that exhibits at least 85% sequence identity to SEQ ID NO: 131 or 133, and the VL set forth in SEQ ID NO: 190, 191 or 193 or a sequence of amino acids that exhibits at least 85% sequence identity to SEQ ID NO: 190, 191 or 193;

[0590] the VH set forth in SEQ ID NO: 143 or 145 or a sequence of amino acids that exhibits at least 85% sequence identity to SEQ ID NO: 143 or 145, and the VL set forth in SEQ ID NO: 183, 184 or 186 or a sequence of amino acids that exhibits at least 85% sequence identity to SEQ ID NO: 183, 184 or 186;

[0591] the VH set forth in SEQ ID NO: 149 or 151 or a sequence of amino acids that exhibits at least 85% sequence identity to SEQ ID NO: 149 or 151, and the VL set forth in SEQ ID NO: 197, 198 or 200 or a sequence of amino acids that exhibits at least 85% sequence identity to SEQ ID NO: 197, 198 or 200;

[0592] the VH set forth in SEQ ID NO: 143 or 145 or a sequence of amino acids that exhibits at least 85% sequence identity to SEQ ID NO: 143 or 145, and the VL set forth in SEQ ID NO: 197, 198 or 200 or a sequence of amino acids that exhibits at least 85% sequence identity to SEQ ID NO: 197, 198 or 200;

[0593] the VH set forth in SEQ ID NO: 149 or 151 or a sequence of amino acids that exhibits at least 85% sequence identity to SEQ ID NO: 149 or 151, and the VL set forth in SEQ ID NO: 204, 205 or 207 or a sequence of amino acids that exhibits at least 85% sequence identity to SEQ ID NO: 204, 205 or 207;

[0594] the VH set forth in SEQ ID NO: 143 or 145 or a sequence of amino acids that exhibits at least 85% sequence identity to SEQ ID NO: 143 or 145, and the VL set forth in SEQ ID NO: 204, 205 or 207 or a sequence of amino acids that exhibits at least 85% sequence identity to SEQ ID NO: 204, 205 or 207;

[0595] the VH set forth in SEQ ID NO: 211 or 213 or a sequence of amino acids that exhibits at least 85% sequence identity to SEQ ID NO: 211 or 213, and the VL set forth in SEQ ID NO: 253, 254 or 256 or a sequence of amino acids that exhibits at least 85% sequence identity to SEQ ID NO: 253, 254 or 256;

[0596] the VH set forth in SEQ ID NO: 217 or 219 or a sequence of amino acids that exhibits at least 85% sequence identity to SEQ ID NO: 217 or 219, and the VL set forth in SEQ ID NO: 253, 254 or 256 or a sequence of amino acids that exhibits at least 85% sequence identity to SEQ ID NO: 253, 254 or 256;

[0597] the VH set forth in SEQ ID NO: 223 or 225 or a sequence of amino acids that exhibits at least 85% sequence identity to SEQ ID NO: 223 or 225, and the VL set forth in SEQ ID NO: 260, 261 or 263 or a sequence of amino acids that exhibits at least 85% sequence identity to SEQ ID NO: 260, 261 or 263;

[0598] the VH set forth in SEQ ID NO: 229 or 231 or a sequence of amino acids that exhibits at least 85% sequence identity to SEQ ID NO: 229 or 231, and the VL set forth in SEQ ID NO: 260, 261 or 263 or a sequence of amino acids that exhibits at least 85% sequence identity to SEQ ID NO: 260, 261 or 263;

[0599] the VH set forth in SEQ ID NO: 235 or 237 or a sequence of amino acids that exhibits at least 85% sequence identity to SEQ ID NO: 235 or 237, and the VL set forth in SEQ ID NO: 267, 268 or 270 or a sequence of amino acids that exhibits at least 85% sequence identity to SEQ ID NO: 267, 268 or 270;

[0600] the VH set forth in SEQ ID NO: 241 or 243 or a sequence of amino acids that exhibits at least 85% sequence identity to SEQ ID NO: 241 or 243, and the VL set forth in SEQ ID NO: 274, 275 or 277 or a sequence of amino acids that exhibits at least 85% sequence identity to SEQ ID NO: 274, 275 or 277;

[0601] the VH set forth in SEQ ID NO: 223 or 225 or a sequence of amino acids that exhibits at least 85% sequence identity to SEQ ID NO: 223 or 225, and the VL set forth in SEQ ID NO: 274, 275 or 277 or a sequence of amino acids that exhibits at least 85% sequence identity to SEQ ID NO: 274, 275 or 277;

[0602] the VH set forth in SEQ ID NO: 229 or 231 or a sequence of amino acids that exhibits at least 85% sequence identity to SEQ ID NO: 229 or 231, and the VL set forth in SEQ ID NO: 274, 275 or 277 or a sequence of amino acids that exhibits at least 85% sequence identity to SEQ ID NO: 274, 275 or 277;

[0603] the VH set forth in SEQ ID NO: 235 or 237 or a sequence of amino acids that exhibits at least 85% sequence identity to SEQ ID NO: 235 or 237, and the VL set forth in SEQ ID NO: 281, 282 or 284 or a sequence of amino acids that exhibits at least 85% sequence identity to SEQ ID NO: 281, 282 or 284;

[0604] the VH set forth in SEQ ID NO: 247 or 249 or a sequence of amino acids that exhibits at least 85% sequence identity to SEQ ID NO: 247 or 249, and the VL set forth in SEQ ID NO: 281, 282 or 284 or a sequence of amino acids that exhibits at least 85% sequence identity to SEQ ID NO: 281, 282 or 284;

[0605] the VH set forth in SEQ ID NO: 223 or 225 or a sequence of amino acids that exhibits at least 85% sequence identity to SEQ ID NO: 223 or 225, and the VL set forth in SEQ ID NO: 281, 282 or 284 or a sequence of amino acids that exhibits at least 85% sequence identity to SEQ ID NO: 281, 282 or 284;

[0606] the VH set forth in SEQ ID NO: 229 or 231 or a sequence of amino acids that exhibits at least 85% sequence identity to SEQ ID NO: 229 or 231, and the VL set forth in SEQ ID NO: 281, 282 or 284 or a sequence of amino acids that exhibits at least 85% sequence identity to SEQ ID NO: 281, 282 or 284;

[0607] the VH set forth in SEQ ID NO: 235 or 237 or a sequence of amino acids that exhibits at least 85% sequence identity to SEQ ID NO: 235 or 237, and the VL set forth in SEQ ID NO: 288, 289 or 291 or a sequence of amino acids that exhibits at least 85% sequence identity to SEQ ID NO: 288, 289 or 291;

[0608] the VH set forth in SEQ ID NO: 247 or 249 or a sequence of amino acids that exhibits at least 85% sequence identity to SEQ ID NO: 247 or 249, and the VL set forth in SEQ ID NO: 288, 289 or 291 or a sequence of amino acids that exhibits at least 85% sequence identity to SEQ ID NO: 288, 289 or 291;

[0609] the VH set forth in SEQ ID NO: 223 or 225 or a sequence of amino acids that exhibits at least 85% sequence identity to SEQ ID NO: 223 or 225, and the VL set forth in SEQ ID NO: 288, 289 or 291 or a sequence of amino acids that exhibits at least 85% sequence identity to SEQ ID NO: 288, 289 or 291;

[0610] the VH set forth in SEQ ID NO: 229 or 231 or a sequence of amino acids that exhibits at least 85% sequence identity to SEQ ID NO: 229 or 231, and the VL set forth in SEQ ID NO: 288, 289 or 291 or a sequence of amino acids that exhibits at least 85% sequence identity to SEQ ID NO: 288, 289 or 291;

[0611] the VH set forth in SEQ ID NO: 235 or 237 or a sequence of amino acids that exhibits at least 85% sequence identity to SEQ ID NO: 235 or 237, and the VL set forth in SEQ ID NO: 295, 296 or 298 or a sequence of amino acids that exhibits at least 85% sequence identity to SEQ ID NO: 295, 296 or 298;

[0612] the VH set forth in SEQ ID NO: 247 or 249 or a sequence of amino acids that exhibits at least 85% sequence identity to SEQ ID NO: 247 or 249, and the VL set forth in SEQ ID NO: 302, 303 or 305 or a sequence of amino acids that exhibits at least 85% sequence identity to SEQ ID NO: 302, 303 or 305;

[0613] the VH set forth in SEQ ID NO: 211 or 213 or a sequence of amino acids that exhibits at least 85% sequence identity to SEQ ID NO: 211 or 213, and the VL set forth in SEQ ID NO: 302, 303 or 305 or a sequence of amino acids that exhibits at least 85% sequence identity to SEQ ID NO: 302, 303 or 305;

[0614] the VH set forth in SEQ ID NO: 211 or 213 or a sequence of amino acids that exhibits at least 85% sequence identity to SEQ ID NO: 211 or 213, and the VL set forth in SEQ ID NO: 281, 282 or 284 or a sequence of amino acids that exhibits at least 85% sequence identity to SEQ ID NO: 281, 282 or 284;

[0615] the VH set forth in SEQ ID NO: 211 or 213 or a sequence of amino acids that exhibits at least 85% sequence identity to SEQ ID NO: 211 or 213, and the VL set forth in SEQ ID NO: 288, 289 or 291 or a sequence of amino acids that exhibits at least 85% sequence identity to SEQ ID NO: 288, 289 or 291;

[0616] Any of the above anti-EGFR antibodies can further contain a heavy chain constant region or light chain constant region, or a portion thereof. The constant region can be any immunoglobulin class (e.g., IgG, IgM, IgD, IgE, IgA and IgY), any subclass (e.g., IgG1, IgG2, IgG3, IgG4, IgA1 and IgA2) or sub-subclass (e.g., IgG2a and IgG2b). In particular examples, the antibodies provided herein can be full-length antibodies further containing a constant region from an IgG1 antibody, or other subtype from among IgG2, IgG3 or IgG4. For example, the anti-EGFR antibodies can be full-length IgG1 antibodies containing a kappa light chain constant region (set forth in SEQ ID NO: 31 or 33) or an IgG1 heavy chain constant region set forth in any of SEQ ID NOS: 19-23). The heavy chain constant region also can be from an Ig

class, such as IgG2 (set forth in SEQ ID NO: 24), IgG3 (set forth in SEQ ID NO: 25) or IgG4 (set forth in SEQ ID NO: 26). The light chain constant region also can be a human lambda light chain (set forth in SEQ ID NO: 32).

[0617] Exemplary humanized anti-EGFR antibodies provided herein include any containing a heavy and light chain having a sequence of amino acids set forth as:

[0618] the heavy chain set forth in SEQ ID NO: 59 or a sequence of amino acids that exhibits at least 85% sequence identity to SEQ ID NO: 59, and the variable light chain set forth in SEQ ID NO: 181 or a sequence of amino acids that exhibits at least 85% sequence identity to SEQ ID NO: 181;

[0619] the heavy chain set forth in SEQ ID NO: 129 or a sequence of amino acids that exhibits at least 85% sequence identity to SEQ ID NO: 129, and the variable light chain set forth in SEQ ID NO: 153 or a sequence of amino acids that exhibits at least 85% sequence identity to SEQ ID NO: 153;

[0620] the heavy chain set forth in SEQ ID NO: 129 or a sequence of amino acids that exhibits at least 85% sequence identity to SEQ ID NO: 129, and the variable light chain set forth in SEQ ID NO: 160 or a sequence of amino acids that exhibits at least 85% sequence identity to SEQ ID NO: 160;

[0621] the heavy chain set forth in SEQ ID NO: 135 or a sequence of amino acids that exhibits at least 85% sequence identity to SEQ ID NO: 135, and the variable light chain set forth in SEQ ID NO: 153 or a sequence of amino acids that exhibits at least 85% sequence identity to SEQ ID NO: 153;

[0622] the heavy chain set forth in SEQ ID NO: 129 or a sequence of amino acids that exhibits at least 85% sequence identity to SEQ ID NO: 129, and the variable light chain set forth in SEQ ID NO: 167 or a sequence of amino acids that exhibits at least 85% sequence identity to SEQ ID NO: 167;

[0623] the heavy chain set forth in SEQ ID NO: 129 or a sequence of amino acids that exhibits at least 85% sequence identity to SEQ ID NO: 129, and the variable light chain set forth in SEQ ID NO: 174 or a sequence of amino acids that exhibits at least 85% sequence identity to SEQ ID NO: 174;

[0624] the heavy chain set forth in SEQ ID NO: 129 or a sequence of amino acids that exhibits at least 85% sequence identity to SEQ ID NO: 129, and the variable light chain set forth in SEQ ID NO: 181 or a sequence of amino acids that exhibits at least 85% sequence identity to SEQ ID NO: 181;

[0625] the heavy chain set forth in SEQ ID NO: 135 or a sequence of amino acids that exhibits at least 85% sequence identity to SEQ ID NO: 135, and the variable light chain set forth in SEQ ID NO: 181 or a sequence of amino acids that exhibits at least 85% sequence identity to SEQ ID NO: 181;

[0626] the heavy chain set forth in SEQ ID NO: 129 or a sequence of amino acids that exhibits at least 85% sequence identity to SEQ ID NO: 129, and the variable light chain set forth in SEQ ID NO: 188 or a sequence of amino acids that exhibits at least 85% sequence identity to SEQ ID NO: 188;

[0627] the heavy chain set forth in SEQ ID NO: 141 or a sequence of amino acids that exhibits at least 85% sequence identity to SEQ ID NO: 141, and the variable light chain set forth in SEQ ID NO: 181 or a sequence of amino acids that exhibits at least 85% sequence identity to SEQ ID NO: 181;

[0628] the heavy chain set forth in SEQ ID NO: 147 or a sequence of amino acids that exhibits at least 85% sequence identity to SEQ ID NO: 147, and the variable light chain set forth in SEQ ID NO: 195 or a sequence of amino acids that exhibits at least 85% sequence identity to SEQ ID NO: 195;

[0629] the heavy chain set forth in SEQ ID NO: 141 or a sequence of amino acids that exhibits at least 85% sequence identity to SEQ ID NO: 141, and the variable light chain set forth in SEQ ID NO: 195 or a sequence of amino acids that exhibits at least 85% sequence identity to SEQ ID NO: 195;

[0630] the heavy chain set forth in SEQ ID NO: 147 or a sequence of amino acids that exhibits at least 85% sequence identity to SEQ ID NO: 147, and the variable light chain set forth in SEQ ID NO: 202 or a sequence of amino acids that exhibits at least 85% sequence identity to SEQ ID NO: 202;

[0631] the heavy chain set forth in SEQ ID NO: 141 or a sequence of amino acids that exhibits at least 85% sequence identity to SEQ ID NO: 141, and the variable light chain set forth in SEQ ID NO: 202 or a sequence of amino acids that exhibits at least 85% sequence identity to SEQ ID NO: 202;

[0632] the heavy chain set forth in SEQ ID NO: 209 or a sequence of amino acids that exhibits at least 85% sequence identity to SEQ ID NO: 209, and the variable light chain set forth in SEQ ID NO: 251 or a sequence of amino acids that exhibits at least 85% sequence identity to SEQ ID NO: 251;

[0633] the heavy chain set forth in SEQ ID NO: 215 or a sequence of amino acids that exhibits at least 85% sequence identity to SEQ ID NO: 215, and the variable light chain set forth in SEQ ID NO: 251 or a sequence of amino acids that exhibits at least 85% sequence identity to SEQ ID NO: 251;

[0634] the heavy chain set forth in SEQ ID NO: 221 or a sequence of amino acids that exhibits at least 85% sequence identity to SEQ ID NO: 221, and the variable light chain set forth in SEQ ID NO: 258 or a sequence of amino acids that exhibits at least 85% sequence identity to SEQ ID NO: 258;

[0635] the heavy chain set forth in SEQ ID NO: 227 or a sequence of amino acids that exhibits at least 85% sequence identity to SEQ ID NO: 227, and the variable light chain set forth in SEQ ID NO: 258 or a sequence of amino acids that exhibits at least 85% sequence identity to SEQ ID NO: 258;

[0636] the heavy chain set forth in SEQ ID NO: 233 or a sequence of amino acids that exhibits at least 85% sequence identity to SEQ ID NO: 233, and the variable light chain set forth in SEQ ID NO: 265 or a sequence of amino acids that exhibits at least 85% sequence identity to SEQ ID NO: 265;

[0637] the heavy chain set forth in SEQ ID NO: 239 or a sequence of amino acids that exhibits at least 85% sequence identity to SEQ ID NO: 239, and the variable light chain set forth in SEQ ID NO: 272 or a sequence of amino acids that exhibits at least 85% sequence identity to SEQ ID NO: 272;

[0638] the heavy chain set forth in SEQ ID NO: 221 or a sequence of amino acids that exhibits at least 85% sequence identity to SEQ ID NO: 221, and the variable light chain set forth in SEQ ID NO: 272 or a sequence of amino acids that exhibits at least 85% sequence identity to SEQ ID NO: 272;

[0639] the heavy chain set forth in SEQ ID NO: 227 or a sequence of amino acids that exhibits at least 85% sequence identity to SEQ ID NO: 227, and the variable light chain set forth in SEQ ID NO: 272 or a sequence of amino acids that exhibits at least 85% sequence identity to SEQ ID NO: 272;

[0640] the heavy chain set forth in SEQ ID NO: 233 or a sequence of amino acids that exhibits at least 85% sequence identity to SEQ ID NO: 233, and the variable light chain set forth in SEQ ID NO: 279 or a sequence of amino acids that exhibits at least 85% sequence identity to SEQ ID NO: 279;

[0641] the heavy chain set forth in SEQ ID NO: 245 or a sequence of amino acids that exhibits at least 85% sequence identity to SEQ ID NO: 245, and the variable light chain set forth in SEQ ID NO: 279 or a sequence of amino acids that exhibits at least 85% sequence identity to SEQ ID NO: 279;

[0642] the heavy chain set forth in SEQ ID NO: 221 or a sequence of amino acids that exhibits at least 85% sequence identity to SEQ ID NO: 221, and the variable light chain set forth in SEQ ID NO: 279 or a sequence of amino acids that exhibits at least 85% sequence identity to SEQ ID NO: 279;

[0643] the heavy chain set forth in SEQ ID NO: 227 or a sequence of amino acids that exhibits at least 85% sequence identity to SEQ ID NO: 227, and the variable light chain set forth in SEQ ID NO: 279 or a sequence of amino acids that exhibits at least 85% sequence identity to SEQ ID NO: 279;

[0644] the heavy chain set forth in SEQ ID NO: 233 or a sequence of amino acids that exhibits at least 85% sequence identity to SEQ ID NO: 233, and the variable light chain set forth in SEQ ID NO: 286 or a sequence of amino acids that exhibits at least 85% sequence identity to SEQ ID NO: 286;

[0645] the heavy chain set forth in SEQ ID NO: 245 or a sequence of amino acids that exhibits at least 85% sequence identity to SEQ ID NO: 245, and the variable light chain set forth in SEQ ID NO: 286 or a sequence of amino acids that exhibits at least 85% sequence identity to SEQ ID NO: 286;

[0646] the heavy chain set forth in SEQ ID NO: 221 or a sequence of amino acids that exhibits at least 85% sequence identity to SEQ ID NO: 221, and the variable light chain set forth in SEQ ID NO: 286 or a sequence of amino acids that exhibits at least 85% sequence identity to SEQ ID NO: 286;

[0647] the heavy chain set forth in SEQ ID NO: 227 or a sequence of amino acids that exhibits at least 85% sequence identity to SEQ ID NO: 227, and the variable light chain set forth in SEQ ID NO: 286 or a sequence of amino acids that exhibits at least 85% sequence identity to SEQ ID NO: 286;

[0648] the heavy chain set forth in SEQ ID NO: 233 or a sequence of amino acids that exhibits at least 85% sequence identity to SEQ ID NO: 233, and the variable light chain set forth in SEQ ID NO: 293 or a sequence of amino acids that exhibits at least 85% sequence identity to SEQ ID NO: 293;

[0649] the heavy chain set forth in SEQ ID NO: 245 or a sequence of amino acids that exhibits at least 85% sequence identity to SEQ ID NO: 245, and the variable light chain set forth in SEQ ID NO: 300 or a sequence of amino acids that exhibits at least 85% sequence identity to SEQ ID NO: 300;

[0650] the heavy chain set forth in SEQ ID NO: 209 or a sequence of amino acids that exhibits at least 85% sequence identity to SEQ ID NO: 209, and the variable light chain set forth in SEQ ID NO: 300 or a sequence of amino acids that exhibits at least 85% sequence identity to SEQ ID NO: 300;

[0651] the heavy chain set forth in SEQ ID NO: 209 or a sequence of amino acids that exhibits at least 85% sequence identity to SEQ ID NO: 209, and the variable light chain set forth in SEQ ID NO: 279 or a sequence of amino acids that exhibits at least 85% sequence identity to SEQ ID NO: 279;

[0652] the heavy chain set forth in SEQ ID NO: 209 or a sequence of amino acids that exhibits at least 85% sequence identity to SEQ ID NO: 209, and the variable light chain set forth in SEQ ID NO: 286 or a sequence of amino acids that exhibits at least 85% sequence identity to SEQ ID NO: 286;

[0653] Modified anti-EGFR antibodies provided herein also include antibody fragments, which are derivatives of full-length antibody that contain less than the full sequence of the full-length antibodies but retain at least a portion of the specific binding abilities of the full-length antibody, for example the variable portions of the heavy and light chain. The antibody fragments also can include antigen-binding portions of an antibody that can be inserted into an antibody framework (e.g., chimeric antibodies) in order to retain the binding affinity of the parent antibody. Examples of antibody fragments include, but are not limited to, Fab, Fab′, F(ab′)₂, single-chain Fv (scFv), Fv, dsFv, diabody, Fd and Fd′ fragments, and other fragments, including modified fragments (see, for example, Methods in Molecular Biology, Vol. 207: Recombinant Antibodies for Cancer Therapy Methods and Protocols (2003); Chapter 1; p 3-25, Kipriyanov). Antibody fragments can include multiple chains linked together, such as by disulfide bridges and can be produced recombinantly. Antibody fragments also can contain synthetic linkers, such as peptide linkers, to link two or more domains. Methods for generating antigen-binding fragments are well-known known in the art and can be used to modify any antibody provided herein. Fragments of antibody molecules can be generated, such as for example, by enzymatic cleavage. For example, upon protease cleavage by papain, a dimer of the heavy chain constant regions, the Fc domain, is cleaved from the two Fab regions (i.e., the portions containing the variable regions). Alternatively, upon protease cleavage by pepsin can be used to prepare divalent F(ab′)₂ fragments of an antibody.

[0654] Single chain antibodies can be recombinantly engineered by joining a heavy chain variable region (V_{H}) and light chain variable region (V_{L}) of a specific antibody. The particular nucleic acid sequences for the variable regions can be cloned by standard molecular biology methods, such as, for example, by polymerase chain reaction (PCR) and other recombination nucleic acid technologies. Methods for producing scFvs are described, for example, by Whitlow and Filpula (1991) Methods, 2: 97-105; Bird et al. (1988) Science 242:423-426; Pack et al. (1993) Bio/Technology 11:1271-77; and U.S. Pat. Nos. 4,946,778, 5,840,300, 5,667,988, 5,658,727, 5,258,498).

[0655] Any of the above humanized anti-EGFR antibodies, or antigen-binding fragments, provided herein exhibit greater binding activity under conditions that include acidic pH of from 6.0 to 6.5, inclusive, and/or a lactate concentration of 15 mM to 20 mM, inclusive, compared to under conditions that include neutral pH of or about 7.4 and/or a lactate concentration of or about 1 mM, such that the ratio of binding activity is greater than 1.0, such as greater than 1.2, 1.3, 1.4, 1.5, 1.6, 1.7, 1.8, 1.9, 2.0, 3.0, 4.0, 5.0, 6.0, 7.0, 8.0, 9.0, 10.0, 20.0, 30.0, 40.0, 50.0 or more. Also, typically, any of the above humanized anti-EGFR antibodies, or antigen-binding fragments thereof, also effect significant productivity when produced in mammalian cells, particularly compared to the non-humanized parental antibody. For example, mammalian host cells containing nucleic acid encoding any of the above humanized anti-EGFR antibodies (e.g., those containing a nucleic acid encoding a heavy and light chain as set forth in Table 10) can effect expression of the antibody at a concentration that is greater than or greater than about or that is at least 1 mg/mL, 1.5 mg/mL, 2.0 mg/mL, 2.5 mg/mL, 3.0 mg/mL, 3.5 mg/mL, 4.0 mg/mL, 4.5 mg/mL, 5.0 mg/mL, 5.5 mg/mL, 6.0 mg/mL, 6.5 mg/mL, 7.0 mg/mL, 8.0 mg/mL, 9.0 mg/mL, 10.0 mg/mL or more.

[0656] 3. Anti-EGFR Antibodies Containing 104D Modification

[0657] Also provided herein are modified anti-EGFR antibodies containing an amino acid replacement of aspartic acid (D), at a position corresponding to position 104 (designated 104D) of the variable domain of the heavy chain of an anti-EGFR antibody with reference to SEQ ID NO: 2 or 7. A position corresponding to position 104 in an unmodified anti-EGFR antibody can be determined by alignment of the variable heavy chain with the variable heavy chain set forth in SEQ ID NO: 2 or 7 (see, e.g., FIG. 2). Substitution of glutamic acid (E) at position 104 with aspartic acid (D) is a conservative mutation. Thus, any of the 104E antibodies described herein, can be conservatively mutated to generate a corresponding 104D anti-EGFR antibody.

[0658] The modified 104D anti-EGFR antibodies, or antigen-binding fragments thereof, provided herein, minimally contain a variable heavy chain and a variable light chain, or a portion thereof that is sufficient to bind EGFR antigen (e.g., human EGFR), or a soluble fragment thereof, when assembled into an antibody, whereby at least the variable heavy chain is modified by replacement with 104D. The resulting modified anti-EGFR antibodies can be full-length IgG1 antibodies, or can be fragments thereof, for example, a Fab, Fab′, F(ab′)₂, single-chain Fv (scFv), Fv, dsFv, diabody, Fd and Fd′ fragments. Further, the resulting modified anti-EGFR antibodies can contain a domain other than IgG1.

[0659] The 104D modification can be introduced into any anti-EGFR antibody described herein or known in the art, such as an unmodified anti-EGFR antibody (e.g., cetuximab antibody), antigen-binding fragment thereof or variant thereof. Exemplary unmodified anti-EGFR antibodies in which the amino acid replacement(s) herein can be made, include, but are not limited to, an anti-EGFR cetuximab antibody, or antigen-binding fragment or variant thereof, that contains a heavy chain set forth in any of SEQ ID NOS: 1, 2, 5, 6, 7, 12, 14 or 16, or an antigen-binding fragment or variant thereof containing at least 75%, 80%, 81%, 82%, 83%, 84%, 85%, 86%, 86%, 88%, 89%, 90%, 91%, 92%, 93%, 94%, 95%, 96%, 97%, 98%, 99% or more sequence identity to any of SEQ ID NOS: 1, 2, 5, 6, 7, 12, 14 or 16. For example, an unmodified anti-EGFR antibody can contain a sequence of amino acids including a variable heavy chain (VH) set forth in SEQ ID NO: 2 and variable light chain (VL) set forth in SEQ ID NO: 4, a VH set forth in SEQ ID NO: 7 and a VL set forth in SEQ ID NO: 9, a VH set forth in SEQ ID NO: 7 and a VL set forth in SEQ ID NO: 11, a VH set forth in SEQ ID NO: 14 or a VL set forth in SEQ ID NO: 15, or a VH set forth in SEQ ID NO: 16 or a VL set forth in SEQ ID NO: 17, or variant thereof that contains a variable heavy and/or variable light chain that exhibits least 75%, 80%, 81%, 82%, 83%, 84%, 85%, 86%, 86%, 88%, 89%, 90%, 91%, 92%, 93%, 94%, 95%, 96%, 97%, 98%, 99% sequence identity to one or both of the variable heavy or light chains SEQ ID NOS.

[0660] The unmodified anti-EGFR antibody can be a full-length antibody or antigen-binding fragment thereof. For example, the unmodified anti-EGFR antibody can contain any of the VH or VL regions above and a constant region of the heavy and light chain including a heavy chain set forth in SEQ ID NO: 1 and a light chain set forth in SEQ ID NO: 3, a heavy chain set forth in SEQ ID NO: 5 and a light chain set forth in SEQ ID NO: 3, a heavy chain set forth in SEQ ID NO: 12 and a light chain set forth in SEQ ID NO: 13, a heavy chain set forth in SEQ ID NO: 6 and a light chain set forth in SEQ ID NO: 8 or a heavy chain set forth in SEQ ID NO: 6 and a light chain set forth in SEQ ID NO: 10, or can be an antigen-binding fragment of the full-length antibody or variant thereof that contains a heavy and/or light chain that exhibits least 75%, 80%, 81%, 82%, 83%, 84%, 85%, 86%, 86%, 88%, 89%, 90%, 91%, 92%, 93%, 94%, 95%, 96%, 97%, 98%, 99% to one or both of the heavy or light chains SEQ ID NOS. In any of such examples, modified anti-EGFR antibodies or antigen-binding fragments thereof provided herein can contain a variable heavy chain with the amino acid replacement Y104D, where the tyrosine (Y) at a position corresponding to position 104 is replaced with D.

[0661] The modified anti-EGFR antibody provided herein can contain only an amino acid replacement 104D in the variable heavy chain compared to the unmodified anti-EGFR antibody or can contain amino acid replacements or modifications, in addition to 104D, in one or both of the heavy chain or light chain. For example, modified anti-EGFR antibodies provided herein can contain at least or 1, 2, 3, 4, 5, 6, 7, 8, 9, 10, 11, 12, 13, 14, 15, 16, 17, 18, 19, 20, or more modified positions compared to the anti-EGFR antibody not containing the modification. Exemplary additional modifications in the heavy chain or light chain include any set forth in Section C.1 above (e.g., Tables 6 and 8). It is understood that in all examples of the modified 104D anti-EGFR antibodies provided herein, the modified anti-EGFR antibody contains an amino acid replacement 104D compared to the unmodified anti-EGFR antibody, and exhibits greater binding activity under conditions that include one or both of acidic pH of from 6.0 to 6.5, inclusive, and/or a lactate concentration of 10 mM to 20 mM, inclusive, compared to under conditions that include one or both of neutral pH of or about 7.4 and/or a lactate concentration of or of about 1 mM.

[0662] The modified 104D anti-EGFR antibodies provided herein exhibit greater binding activity under conditions that include one or both of acidic pH of from 6.0 to 6.5, inclusive, and/or a lactate concentration of 10 mM to 20 mM, inclusive, compared to under conditions that include one or both of neutral pH of or about 7.4 and/or a lactate concentration of or about 1 mM. For example, the ratio of binding activity under conditions that include one or both of pH 6.0 to 6.5/or and 10 mM to 20 mM lactate versus binding activity under conditions that include one or both of or about pH 7.4 and/or about or 1 mM lactate can be at least or greater than 1.1, 1.2, 1.3, 1.4, 1.5, 1.6, 1.7, 1.8, 1.9, 2.0, 2.5, 3.0, 3.5, 4.0, 4.5, 5.0, 6.0, 7.0, 8.0, 9.0, 10.0, 11.0, 12.0, 13.0, 14.0, 15.0, 20.0, 25.0, 30.0, 35.0, 40.0, 45.0, 50.0 or more. The modified anti-EGFR antibodies provided herein can exhibit the altered binding activity in the presence of physiologic concentrations of protein (e.g., 25% serum). Hence, the 104D antibodies provided herein can exhibit tumor selective EGFR binding activity, whereby binding activity is greater under conditions that exist in a tumor microenvironment compared to conditions that exist in a non-tumor microenvironment.

[0663] Any antibody described herein can be modified to contain a 104D substitution, including combinatorial mutant antibodies provided herein and humanized antibodies provided herein. The heavy chain and light chain sequences of non-limiting exemplary 104D modified anti-EGFR antibodies are set forth in Table 11 below. Also provided herein are anti-EGFR antibodies that contain a heavy chain and/or a light chain that contains a sequence of amino acids that exhibits at least 75%, 80%, 85%, 86%, 87%, 88%, 89%, 90%, 91%, 92%, 93%, 94%, 95%, 96%, 97%, 98%, 99% or more sequence identity to any of the SEQ ID NOS of the heavy chain and/or light chain set forth in Table 11, as long as the resulting antibody exhibits greater binding activity under conditions that include one or both of acidic pH of from 6.0 to 6.5, inclusive, and/or a lactate concentration of 10 mM to 20 mM, inclusive, compared to under conditions that include one or both of neutral pH of or about 7.4 and/or a lactate concentration of or about 1 mM.

TABLE 11
Exemplary 104D Modified Anti-EGFR Antibodies

| | Heavy chain | Light chain |
|---|---|---|
| | (variable chain | (variable chain |
| | corresponding to | corresponding to |
| | amino acids 1-119 | amino acids 1-107 |
| | of SEQ ID NO) | of SEQ ID NO) |
| Y104D | 67 | 8 |
| Y104D/Q111P | 53 | 8 |
| S25C/Y104D | 352 | 8 |
| S53G/Y104D | 353 | 8 |
| S53G/Y104D/Q111P | 354 | 8 |
| S25V/Y104D | 355 | 8 |
| S25V/Y104D/Q111P | 356 | 8 |
| S25V/S53G/Y104D | 357 | 8 |
| S25V/S53G/Y104D/Q111P | 358 | 8 |
| F27G/Y104D | 367 | 8 |
| F27G/Y104D/Q111P | 368 | 8 |
| F27G/S53G/Y104D | 369 | 8 |
| F27G/S53G/Y104D/Q111P | 370 | 8 |
| T30F/Y104D | 359 | 8 |
| T30F/Y104D/Q111P | 360 | 8 |
| T30F/S53G/Y104D | 361 | 8 |
| T30F/S53G/Y104D/Q111P | 362 | 8 |
| D72L/Y104D | 363 | 8 |
| D72L/Y104D/Q111P | 364 | 8 |
| S53G/D72L/Y104D | 365 | 8 |
| S53G/D72L/Y104D/Q111P | 366 | 8 |
| Y104D/I29S | 67 | 124 |
| Y104D/Q111P/I29S | 53 | 124 |

Humanized Antibodies containing 104D

| | | |
|---|---|---|
| D-h | 57 | 181 |
| DP-h1 | 372 | 153 |
| DP-h2 | 372 | 160 |
| DP-h3 | 55 | 153 |
| DP-h4 | 372 | 167 |
| DP-h5 | 372 | 174 |
| DP-h6 | 372 | 181 |
| DP-h7 | 55 | 181 |
| DP-h8 | 372 | 188 |
| DP-h9 | 374 | 181 |
| DP-h10 | 376 | 195 |
| DP-h12 | 374 | 195 |
| DP-h13 | 376 | 202 |
| DP-h14 | 374 | 202 |
| FDP-h1 | 378 | 251 |
| FDP-h2 | 380 | 251 |
| FDP-h3 | 65 | 258 |
| FDP-h4 | 382 | 258 |
| FDP-h5 | 384 | 265 |
| FDP-h6 | 386 | 272 |
| FDP-h7 | 65 | 272 |
| FDP-h8 | 382 | 272 |
| FDP-h9 | 384 | 279 |
| FDP-h10 | 388 | 279 |
| FDP-h11 | 65 | 279 |
| FDP-h2 | 382 | 279 |
| FDP-h13 | 384 | 286 |
| FDP-h14 | 388 | 286 |
| FDP-h15 | 65 | 286 |
| FDP-h16 | 382 | 286 |
| FDP-h17 | 384 | 293 |
| FDP-h18 | 388 | 300 |
| FDP-h19 | 378 | 300 |
| FDP-h20 | 378 | 279 |
| FDP-h21 | 378 | 286 |

[0664] 4. Conjugates

[0665] Also provided herein are conjugates that contain a modified anti-EGFR antibody provided herein linked directly or via a linker to one or more targeted agents. These conjugates contain the following components: antibody (Ab), (linker (L))_{q}, (targeted agent)ₘ and are represented by the formula: Ab-(L)_{q}-(targeted agent)ₘ, where q is 0 or more and m is at least 1. Thus, the conjugates provided herein contain one or more targeted agents covalently linked to an modified antibody provided herein. The conjugates exhibit greater binding activity for an EGFR antigen (e.g., human EGFR) or soluble fragment thereof under conditions that include one or both of acidic pH of from 6.0 to 6.5, inclusive, and/or a lactate concentration of 10 mM to 20 mM, inclusive, compared to under conditions that include one or both of neutral pH of or about 7.4 and/or a lactate concentration of or about 1 mM.

[0666] Hence, these conjugates, also called antibody-drug conjugates (ADC) or immunoconjugates, can be used for targeted delivery of cytotoxic or cytostatic agents, i.e., drugs to kill or inhibit tumor cells expressing EGFR in the treatment of cancer. Such conjugates exhibit selectivity to tumor cells that are desired to be eliminated over non-diseased cells, and thereby do not result in unacceptable levels of toxicity to normal cells. Therefore, the conjugates achieve maximal efficacy with minimal toxicity and reduced side effects. Hence, such compounds can be used in the methods described herein of diagnosis or treatment of cancer and other diseases or disorders.

[0667] As stated above, the number of targeted agents is designated by the variable m, where m is an integer of 1 or greater. The targeted agent is conjugated to an antibody provided herein by the number of linkers designated by the variable q, where q is 0 or any integer. The variables q and m are selected such that the resulting conjugate interacts with the EGFR of target cells, in particular, tumor cells, and the targeted agent is internalized by the target cell. Typically, m is between 1 and 8. q is 0 or more, depending upon the number of linked targeting and targeted agents and/or functions of the linker; q is generally 0 to 4. When more than one targeted agent is present in a conjugate, the targeted agents may be the same or different.

[0668] The targeted agents can be covalently linked to the modified anti-EGFR antibody directly or by one or more linkers. Any suitable association among the elements of the conjugate is contemplated as long as the resulting conjugates interact with the EGFR of a target cell such that internalization of the associated targeted agent is effected. Thus, the conjugates provided herein can be produced as fusion proteins, can be chemically coupled, or can include a fusion protein portion and a chemically linked portion or any combination thereof

[0669] The targeted agents also can be modified to render them more suitable for conjugation with the linker and/or the modified anti-EGFR antibody or to increase their intracellular activity. For example, in the case of polypeptide targeted agents, such modifications include, but are not limited to, the introduction of a Cys residue at or near the N-terminus or C-terminus, derivatization to introduce reactive groups, such as thiol groups, and/or addition of sorting signals, such as (Xaa-Asp-Glu-Leu)ₙ (SEQ ID NO. 350 not in sequence listing) where Xaa is Lys or Arg, preferably Lys, and n is 1 to 6, preferably 1-3, at, preferably, the carboxy-terminus of the targeted agent (see, e.g., Seetharam et al. (1991) J. Biol. Chem. 266:17376-17381; and Buchner et al. (1992) Anal. Biochem. 205:263-270), that direct the targeted agent to the endoplasmic reticulum.

[0670] In other examples, the targeted agent can be modified to eliminate one or more cysteine residues, for example, to provide more predictable thiol conjugation at preferred locations. Care must be taken to avoid altering specificity of the resulting modified targeted agent, unless such alteration is desired. In all instances, particular modifications can be determined empirically.

[0671] The linker, L, attaches the antibody to the targeted agent through covalent bond(s). The linker can be a peptide or a non-peptide and can be selected to relieve or decrease steric hindrance caused by proximity of the targeted agent to the modified anti-EGFR antibody and/or to increase or alter other properties of the conjugate, such as the specificity, toxicity, solubility, serum stability and/or intracellular availability of the targeted moiety and/or to increase the flexibility of the linkage between the anti-EGFR antibody and the targeted agent.

[0672] When fusion proteins are contemplated, the linker is selected such that the resulting nucleic acid molecule encodes a fusion protein that binds to and is internalized by cells in a tumor microenvironment that express EGFR and all or a portion of the internalized protein preferably traffics to the cytoplasm. It also is contemplated that several linkers can be joined in order to employ the advantageous properties of each linker. In such instances, the linker portion of a conjugate may contain more than 50 amino acid residues. The number of residues is not important as long as the resulting fusion protein binds to EGFR of the target cell and internalizes the linked targeted agent via a pathway that traffics the targeted agent to the cytoplasm and/or nucleus.

[0673] The targeted agent can be a protein, peptide, nucleic acid, small molecule, therapeutic moiety, or other agent in which targeted delivery to a selected population of tumor cells is desired. Such targeted agents include, but are not limited to, cytotoxic agents, DNA and RNA nucleases, toxins, drugs or other agents. Therapeutic moieties include, but are not limited to, cytotoxic moieties, radioisotopes, chemotherapeutic agents, lytic peptides and cytokines. Exemplary therapeutic moieties include, but are not limited to, taxol; cytochalasin B; gramicidin D; ethidium bromide; emetine; mitomycin; etoposide; teniposide; vincristine; vinblastine; colchicine; doxorubicin; daunorubicin; dihydroxy anthracin dione; maytansine or an analog or derivative thereof; an auristatin or a functional peptide analog or derivative thereof; dolastatin 10 or 15 or an analog thereof; irinotecan or an analog thereof; mitoxantrone; mithramycin; actinomycin D; 1-dehydrotestosterone; a glucocorticoid; procaine; tetracaine; lidocaine; propranolol; puromycin; calicheamicin or an analog or derivative thereof; an antimetabolite; an alkylating agent; a platinum derivative; duocarmycin A, duocarmycin SA, rachelmycin (CC-1065), or an analog or derivative thereof; an antibiotic; a pyrrolo[2,1-c][1,4]-benzodiazepine (PDB); a toxin; ribonuclease (RNase); DNase I, Staphylococcal enterotoxin A; and pokeweed antiviral protein.

[0674] Drugs also can be used as a targeted agent in these methods. Such drugs include 5-fluorouracil, vinca alkaloids, and antibiotics such as dactinomycin, bleomycin, daunorubicin, doxorubicin, idarubicin, methotrexate, mithramycin, mitomycin, mitoxantrone, plicamycin and anthramycin (AMC), neocarzinostatin and vindesine.

[0675] Toxins used in antibody-toxin conjugates include bacterial toxins such as diphtheria toxin, and active fragments thereof and hybrid molecules, plant toxins, such as ricin toxin, small molecule toxins such as geldanamycin, maytansinoids, such as DM1, DM3 and DM4, and calicheamicin. Finally, the auristatin peptides, auristatin E (AE), monomethylauristatin E (MMAE), and monomethylauristatin F (MMAF), synthetic analogs of dolastatin can be employed. Other toxins include cholera toxin, a Shiga-like toxin, LT toxin, C3 toxin, Shiga toxin, pertussis toxin, tetanus toxin, soybean Bowman-Birk protease inhibitor, Pseudomonas exotoxin, alorin, saporin, modeccin, galanin, abrin A chain, modeccin A chain, alpha-sarcin, Aleurites fordii proteins, dianthin proteins, Phytolacca americana proteins, momordica charantia inhibitor, curcin, crotin, gelonin, mitogillin, restrictocin, phenomycin, and enomycin toxins. The toxins can effect their cytotoxic and cytostatic activity by mechanisms including tubulin binding, DNA binding, or topoisomerase inhibition.

[0676] a. Targeted Agents

[0677] The targeted agent can be a protein, peptide, nucleic acid, small molecule, therapeutic moiety, or other agent in which targeted delivery to a selected population of tumor cells is desired. Such targeted agents include, but are not limited to, cytotoxic agents, DNA and RNA nucleases, toxins, drugs or other agents.

### i. Maytansinoid Drug Moieties

[0678] A cytotoxic moiety as a targeted agent in the conjugates include Maytansinoid drug moieties, including those described in U.S. Pat. No. 8,142,784. Maytansine compounds inhibit cell proliferation by inhibiting the formation of microtubules during mitosis through inhibition of polymerization of the microtubule protein, tubulin (Remillard et al. (1975) Science 189:1002-1005; U.S. Pat. No. 5,208,020). Maytansine and maytansinoids are highly cytotoxic but their clinical use in cancer therapy has been greatly limited by their severe systemic side-effects primarily attributed to their poor selectivity for tumors. Clinical trials with maytansine had been discontinued due to serious adverse effects on the central nervous system and gastrointestinal system (Issell et al. (1978) Can. Treatment. Rev. 5:199-207).

[0679] Maytansinoid drug moieties are attractive drug moieties in antibody-drug conjugates because they are: (i) relatively accessible to prepare by fermentation or chemical modification, derivatization of fermentation products, (ii) amenable to derivatization with functional groups suitable for conjugation through the non-disulfide linkers to antibodies, (iii) stable in plasma, and (iv) effective against a variety of tumor cell lines.

[0680] Maytansine compounds suitable for use as maytansinoid drug moieties are well-known in the art, and can be isolated from natural sources according to known methods, produced using genetic engineering techniques (see Yu et al. (2002) PNAS 99:7968-7973), or maytansinol and maytansinol analogs prepared synthetically according to known methods.

[0681] Exemplary maytansinoid drug moieties include those having a modified aromatic ring, such as: C-19-dechloro (U.S. Pat. No. 4,256,746) (prepared by lithium aluminum hydride reduction of ansamitocin P2); C-20-hydroxy (or C-20-demethyl)+/−C-19-dechloro (U.S. Pat. Nos. 4,361,650 and 4,307,016) (prepared by demethylation using Streptomyces or Actinomyces or dechlorination using LAH); and C-20-demethoxy, C-20-acyloxy (—OCOR), +/−dechloro (U.S. Pat. No. 4,294,757) (prepared by acylation using acyl chlorides); and those having modifications at other positions.

[0682] Exemplary maytansinoid drug moieties also include those having modifications such as: C-9-SH, prepared by the reaction of maytansinol with H₂S or P₂S₅ (U.S. Pat. No. 4,424,219); C-14-alkoxymethyl(demethoxy/CH₂OR)(U.S. Pat. No. 4,331,598); C-14-hydroxymethyl or acyloxymethyl (CH₂OH or CH₂OAc) prepared from Nocardia (U.S. Pat. No. 4,450,254); C-15-hydroxy/acyloxy, prepared by the conversion of maytansinol by Streptomyces (U.S. Pat. No. 4,364,866); C-15-methoxy, isolated from Trewia nudiflora (U.S. Pat. No. 4,313,946 and U.S. Pat. No. 4,315,929); C-18-N-demethyl, prepared by the demethylation of maytansinol by Streptomyces (U.S. Pat. No. 4,362,663 and U.S. Pat. No. 4,322,348); and 4,5-deoxy, prepared by the titanium trichloride/LAH reduction of maytansinol (U.S. Pat. No. 4,371,533).

[0683] Many positions on maytansine compounds are known to be useful as the linkage position, depending upon the type of link. For example, for forming an ester linkage, the C-3 position having a hydroxyl group, the C-14 position modified with hydroxymethyl, the C-15 position modified with a hydroxyl group and the C-20 position having a hydroxyl group are all suitable.

[0684] Maytansinoid drug moieties can be linked to a modified anti-EGFR antibody by direct conjugation or using any of the linkers provided herein. In particular examples, the cytotoxic or drug agent is mertansine, also known as DM1 (N₂′-deacetyl-N₂′-(3-mercapto-1-oxopropyl)-maytansine). Mertansine can be linked via 4-mercaptovaleric acid. An emtansine conjugate also can be formed with the antibodies herein using the linker 4-(3-mercapto-2,5-dioxo-1-pyrrolidinylmethyl)-cylohexanecarboxylic acid (MCC).

### ii. Auristatins and Dolastatins Drug Moieties

[0685] A cytotoxic moiety as a targeted agent in the conjugates include auristatins and dolastatins, including those described in U.S. Publication No. US2011/0217321. Dolastatins and auristatins have been shown to interfere with microtubule dynamics, GTP hydrolysis, and nuclear and cellular division (Woyke et al. (2001) Antimicrob. Agents and Chemother. 45(12):3580-3584) and have anticancer (U.S. Pat. No. 5,663,149) and antifungal activity (Pettit et al. (1998) Antimicrob. Agents Chemother. 42:2961-2965). Further, auristatins are highly potent, synthetic, stable, and amenable to chemical modification to allow for linker attachment (Senter (2009) Curr Opin Chem Biol 13:235-244).

[0686] Because auristatins are synthetic, integral structural modifications can be made to significantly alter the properties of the parent drug. For example, monomethylauristatin F (MMAF) terminates with the amino acid residue phenylalanine, which impairs cell membrane permeability (Doronina et al., (2006) Bioconjug Chem. 17:114-124). Thus, conjugation of MMAF to an ADC can facilitate selective drug uptake by antigen-positive cells (Doronina et al., (2006) Bioconjug Chem. 17:114-124; Doronina et al., (2003) Nat Biotechnol. 21:778-784).

[0687] The dolastatin or auristatin drug moiety can be attached to antibodies through the N (amino) terminus or the C (carboxyl) terminus of the peptidic drug moiety (WO 2002/088172). Exemplary auristatin embodiments include N-terminally and C-terminally linked monomethylauristatin drug moieties MMAE and MMAF (Senter et al. (2004) “Proceedings of the American Association for Cancer Research,” Volume 45, Abstract Number 623, and presented Mar. 28, 2004; U.S. Publication No. 2011/0020343).

[0688] Dolastatin or auristatin can be linked to a modified anti-EGFR antibody by direct conjugation or using any of the linkers provided herein. In particular examples, dolastatin or auristatin can be linked to an anti-EGFR antibody with a peptide linker, such as valine-citrulline (Val-Cit).

### iii. Pyrrolobenzodiazepines (PBDs)

[0689] A cytotoxic moiety as a targeted agent in the conjugates include pyrrolobenzodiazepines (PBDs) (or pyrrolo[2,1-c][1, 4]-benzodiazepines), which are sequence-selective DNA alkylating antibiotics with significant antitumor properties. PBDs have the ability to recognize and bond specific sequences of DNA; the preferred DNA sequence is PuGPu (Purine-Guanine-Purine). PBDs also can bond to PuGPy (Purine-Guanine-Pyrimidine) or PyGPu sequences, preferably over PyGPy sequences.

[0690] PBDs can be naturally occurring or synthetic. Naturally occurring PBDs include abbeymycin (Hochlowski, et al., J. Antibiotics, 40, 145-148 (1987)), anthramycin (Leimgruber, et al., J. Am. Chem. Soc, 87, 5793-5795 (1965); Leimgruber, et al., J. Am. Chem. Soc, 87, 5791-5793 (1965)), chicamycin (Konishi, et al., J. Antibiotics, 37, 200-206 (1984)), DC-81 (Thurston, et al., Chem. Brit, 26, 767-772 (1990); Bose, et al., Tetrahedron, 48, 751-758 (1992)), mazethramycin (Kuminoto, et al., J. Antibiotics, 33, 665-667 (1980)), neothramycins A and B (Takeuchi, et al., J. Antibiotics, 29, 93-96 (1976)), porothramycin (Tsunakawa, et al., J. Antibiotics, 41, 1366-1373 (1988)), prothracarcin (Shimizu, et al, J. Antibiotics, 29, 2492-2503 (1982); Langley and Thurston, J. Org. Chem., 52, 91-97 (1987)), sibanomicin (DC-102)(Hara, et al., J. Antibiotics, 41, 702-704 (1988); Itoh, et al., J. Antibiotics, 41, 1281-1284 (1988)), sibiromycin (Leber, et al., J. Am. Chem. Soc, 110, 2992-2993 (1988)), and tomamycin (Arima, et al., J. Antibiotics, 25, 437-444 (1972)). Synthesis of PBDs and generation of synthetic analogs also have been described (see, e.g., U.S. Pat. Nos. 6,562,806, 6,608,192 6,747,144, and 7,049,311, 7,528,126).

[0691] PBDs are of the general structure: (Formula 1)

[chemical structure]

[0692] PBDs differ in the number, type and position of substituents, in both their aromatic A rings and pyrrolo C rings, and in the degree of saturation of the C ring. In the B-ring there is either an imine (N═C), a carbinolamine (NH—CH(OH)), or a carbinolamine methyl ether (NH—CH(OMe)) at the N10-C11 position which is the electrophilic center responsible for alkylating DNA. All of the known natural products have an (S)-configuration at the chiral C11 a position which provides them with a right-handed twist when viewed from the C ring towards the A ring. This gives them the appropriate three-dimensional shape for isohelicity with the minor groove of B-form DNA (Kohn, In Antibiotics III. Springer-Verlag, New York, pp. 3-11 (1975); Hurley and Needham-VanDevanter, Acc. Chem. Res., 19, 230-237 (1986)). PBDs form a covalent, aminal linkage with the exocyclic N2 of the guanine in the PuGPu consensus sequence, forming a PBD/DNA adduct which interferes with DNA processing and leads to cell cycle arrest and apoptosis. Thus PBDs are effective antitumor agents.

[0693] Dimers of PBDs also are effective antitumor agents. PBD dimers cover six base pairs instead of three base pairs covered by the PBD monomer. Further, the PBDs in the dimer can bond sequences in the complementary strands of DNA (i.e., an interstrand guanine-guanine cross-link), leading to sequence-selective DNA cross-linking. PBD dimer-induced cross-linking prevents strand separation, thereby preventing DNA replication. This results in cell cycle arrest and apoptosis in the G2/M interface. The increased coverage of PBD dimers, compared to PBD monomers, in addition to DNA cross-linking leads to substantially increased efficacy as anticancer agents.

[0694] PBD dimers can be homodimers or heterodimers, and are synthesized by joining the two monomer PBD units together through their C8 positions via a flexible linker. Commonly used linkers include propyldioxy (PBD-C8-O—(CH2)3-O-C8′-PBD) and pentyldioxy (PBD-C8—O—(CH2)5-O-C8′-PBD′). The properties of the linker, such as the length of the linker, can be selected to target the dimer to specific DNA sequences (Rahman et al., (2011) Nucleic Acids Res. 39(13): 5800-5812 and Gregson et al., (2004) J Med Chem 47:1161-1174). Exemplary inter-PBD linkers are described in Bose et al., (1992) J Am Chem Soc. 114:4939-4941, Bose et al., (1992) J Chem Soc Chem Commun. 14:1518-1520, Thurston et al., (1996) J Org Chem. 61:8141-8147, Gregson et al., (2001) J Med Chem. 44:737-738, and Gregson et al., J Med Chem 2004; 47:1161-1174. Exemplary PBD dimers have been described in the art (see, e.g., U.S. Pat. Nos. 6,562,806, 6,608,192 6,747,144, 7,049,311, 7,528,126, 7,741,319, 8,592,576) and include, but are not limited to, compounds designated DSB-120 (U.S. Pat. No. 7,049,311), DRH-165 (U.S. Pat. No. 7,049,311), ELB21 (Rahman et al., (2011) Nucleic Acids Res. 39(13): 5800-5812), SG2000/SJG136 (Rahman et al., (2011) Nucleic Acids Res. 39(13): 5800-5812; U.S. Pat. No. 7,049,311), SG2057/DRG16 (Rahman et al., (2011) Nucleic Acids Res. 39(13): 5800-5812), SG2202 (U.S. Pat. No. 7,741,319; Hartley et al., (2010) Cancer Res. 70(17):6849-6858), SG2285 (Hartley et al., (2010) Cancer Res. 70(17):6849-6858), SG3132 (US 20130028919).

[0695] PBDs and PBD dimers can be conjugated to any of the antibodies provided herein by any method, including, but not limited to thiol, amine and phenol conjugation. Typically, the PBD or PBD dimer is conjugated to the antibody using a cleavable linker, that is stable in in vivo circulation, such that the PBD or PBD dimer is released from the antibody following cleavage of the linker inside the target cell. In some examples, PBD or PBD dimer can be conjugated to inter-chain cysteines. In some examples, the antibody can be modified to replace amino acid(s) to insert or remove an inter-chain cysteine to facilitate directed thiol linkage of the PBD or PBD dimer

### iv. Cell Toxin Moieties

[0696] Cell toxins suitable for use in the methods and compositions include small molecules, such as DNA cleaving agents, and proteinaceous cell toxins, including, but are not limited to, bacterial, fungal, plant, insect, snake and spider toxins. Exemplary cell toxins contemplated for incorporation in the conjugates provided herein are set forth in Table 12.

TABLE 12
Exemplary Amino Acid Sequences of Toxins

| Toxin | SEQ ID NO |
|---|---|
| Bryodin | 389 |
| Saporin-6 | 390 |
| Anti-Viral Protein MAP | 391 |
| Shiga Toxin A-Chain | 392 |
| Shiga-Like Toxin Subunit A (Verotoxin 2) | 393 |
| Trichosanthin | 394 |

### (a) DNA Cleaving Agents

[0697] Examples of DNA cleaving agents suitable for inclusion as the cell toxin in the chimeric ligand-toxin used in practicing the methods include, but are not limited to, anthraquinone-oligopyrrol-carboxamide, benzimidazole, leinamycin; dynemycin A; enediyne; as well as biologically active analogs or derivatives thereof (i.e., those having a substantially equivalent biological activity). Known analogs and derivatives are disclosed, for examples in Islam et al., J. Med. Chem. 34 2954-61, 1991; Skibo et al., J. Med. Chem. 37:78-92, 1994; Behroozi et al., Biochemistry 35:1768-74, 1996; Helissey et al., Anticancer Drug Des. 11:527-51, 1996; Unno et al., Chem. Pharm. Bull. 45:125-33, 1997; Unno et al., Bioorg. Med. Chem., 5:903-19, 1997; Unno et al., Bioorg. Med. Chem., 5: 883-901, 1997; and Xu et al., Biochemistry 37:1890-7, 1998). Other examples include, but are not limited to, endiyne quinone imines (U.S. Pat. No. 5,622,958); 2,2r-bis(2-aminoethyl)-4-4′-bithiazole (Lee et al., Biochem. Mol. Biol. Int. 40:151-7, 1996); ellipticine-salen.copper conjugates (Routier et al., Bioconjug. Chem., 8: 789-92, 1997).

### (b) Antimetabolites

[0698] Examples of antimetabolites useful for inclusion as the cell toxin in the chimeric ligand-toxin include, but are not limited to, 5-fluorouracil, methotrexate, melphalan, daunomycin, doxorubicin, nitrogen mustard and mitomycin c.

### (c) Proteinaceous Cell Toxins

[0699] Examples of proteinaceous cell toxins useful for incorporation into the chimeric ligand-toxins used in the methods include, but are not limited to, type one and type two ribosome inactivating proteins (RIP). Useful type one plant RIPs include, but are not limited to, dianthin 30, dianthin 32, lychnin, saporins 1-9, pokeweed activated protein (PAP), PAP II, PAP-R, PAP-S, PAP-C, mapalmin, dodecandrin, bryodin-L, bryodin, Colicin 1 and 2, luffin-A, luffin-B, luffin-S, 19K-protein synthesis inhibitory protein (PSI), 15K-PSI, 9K-PSI, alpha-kirilowin, beta-kirilowin, gelonin, momordin, momordin-II, momordin-Ic, MAP-30, alpha-momorcharin, beta-momorcharin, trichosanthin, TAP-29, trichokirin; barley RIP; flax RIP, tritin, corn RIP, Asparin 1 and 2. Useful type two RIPs include, but are not limited to, volkensin, ricin, nigrin-b, CIP-29, abrin, modeccin, ebulitin-α, ebulitin-β, ebulitin-γ, vircumin, porrectin, as well as the biologically active enzymatic subunits thereof (Stirpe et al., Bio/Technology 10:405-12, 1992; Pastan et al., Annu. Rev. Biochem. 61:331-54; Brinkmann and Pastan, Biochim. et Biophys. Acta 1198:27-45, 1994; and Sandvig and Van Deurs, Physiol. Rev. 76:949-66, 1996).

### (d) Bacterial Toxins

[0700] Examples of bacterial toxins useful as cell toxins include, but are not limited to, shiga toxin and shiga-like toxins (i.e., toxins that have the same activity or structure), as well as the catalytic subunits and biologically functional fragments thereof. These bacterial toxins also are type two RIPs (Sandvig and Van Deurs, Physiol. Rev. 76:949-66, 1996; Armstrong, J. Infect. Dis., 171:1042-5, 1995; Kim et al., Microbiol. Immunol. 41:805-8, 1997, and Skinner et al., Microb. Pathog. 24:117-22, 1998). Additional examples of useful bacterial toxins include, but are not limited to, Pseudomonas exotoxin and Diphtheria toxin (Pastan et al., Annu. Rev. Biochem. 61:331-54; and Brinkmann and Pastan, Biochim. et Biophys. Acta 1198:27-45, 1994). Truncated forms and mutants of the toxin enzymatic subunits also can be used as a cell toxin moiety (Pastan et al., Annu. Rev. Biochem. 61:331-54; Brinkmann and Pastan, Biochim. et Biophys. Acta 1198:27-45, 1994; Mesri et al., J. Biol. Chem. 268:4853-62, 1993; Skinner et al., Microb. Pathog. 24:117-22, 1998; and U.S. Pat. No. 5,082,927). Other targeted agents include, but are not limited to the more than 34 described Colicin family of RNase toxins which include colicins A, B, D, E1-9, cloacin DF13 and the fungal RNase, α-sarcin (Ogawa et al. Science 283: 2097-100, 1999; Smarda et al., Folia Microbiol (Praha) 43:563-82, 1998; Wool et al., Trends Biochem. Sci., 17: 266-69, 1992).

### (e) Porphyrins and Other Light Activated Toxins

[0701] Porphyrins are well-known light activatable toxins that can be readily cross-linked to proteins (see, e.g., U.S. Pat. Nos. 5,257,970; 5,252,720; 5,238,940; 5,192,788; 5,171,749; 5,149,708; 5,202,317; 5,217,966; 5,053,423; 5,109,016; 5,087,636; 5,028,594; 5,093,349; 4,968,715; 4,920,143 and International Publication No. WO 93/02192).

### v. Nucleic Acids for Targeted Delivery

[0702] The conjugates provided herein also can be used to deliver nucleic acids to targeted cells. The nucleic acids include DNA intended to modify the genome of a cell and thereby effect genetic therapy, and DNA and RNA for use as antisense agents. The nucleic acids include antisense RNA, DNA, ribozymes and other oligonucleotides that are intended to be used as antisense agents. The nucleic acids can also include RNA trafficking signals, such as viral packaging sequences (see, e.g., Sullenger et al. (1994) Science 262:1566-1569). The nucleic acids also include DNA molecules that encode intact genes or that encode proteins intended to be used in gene therapy.

[0703] DNA (or RNA) that may be delivered to a cell to effect genetic therapy includes DNA that encodes tumor-specific cytotoxic molecules, such as tumor necrosis factor, viral antigens and other proteins to render a cell susceptible to anti-cancer agents, and DNA encoding genes, such as the defective gene (CFTR) associated with cystic fibrosis (see, e.g., International Application WO 93/03709; and Riordan et al. (1989) Science 245:1066-1073), to replace defective genes.

[0704] Nucleic acids and oligonucleotides for use as described herein can be synthesized by any method known to those of skill in the art (see, e.g., WO 93/01286 and U.S. Pat. Nos. 5,218,088; 5,175,269; and 5,109,124). Identification of oligonucleotides and ribozymes for use as antisense agents is well within the skill in the art. Selection of DNA encoding genes for targeted delivery for genetic therapy also is well within the level of skill of those in the art. For example, the desirable properties, lengths and other characteristics of such oligonucleotides are well-known. Antisense oligonucleotides are designed to resist degradation by endogenous nucleolytic enzymes and include, but are not limited to: phosphorothioate, methylphosphonate, sulfone, sulfate, ketyl, phosphorodithioate, phosphoramidate, phosphate esters, and other such linkages (see, e.g., Agrawal et al. (1987) Tetrahedron Lett. 28:3539-3542; Miller et al. (1971) J. Am. Chem. Soc. 93:6657-6665; Stec et al. (1985) Tetrahedron Lett. 26:2191-2194; Moody et al. (1989) Nucl. Acids Res. 17:4769-4782; Letsinger et al. (1984) Tetrahedron 40:137-143; Eckstein (1985) Annu. Rev. Biochem. 54:367-402; Eckstein (1989) Trends Biochem. Sci. 14:97-100; Stein (1989) In: Oligodeoxynucleotides. Antisense Inhibitors of Gene Expression, Cohen, ed, Macmillan Press, London, pp. 97-117; Jager et al. (1988) Biochemistry 27:7237-7246).

### (a) Antisense Nucleotides, Including: Antisense Oligonucleotides; Triplex Molecules; Dumbbell Oligonucleotides; DNA; Extracellular Protein Binding Oligonucleotides; and Small Nucleotide Molecules

[0705] Antisense nucleotides are oligonucleotides that specifically bind to mRNA that has complementary sequences, thereby preventing translation of the mRNA (see, e.g., U.S. Pat. No. 5,168,053 to Altman et al. U.S. Pat. No. 5,190,931 to Inouye, U.S. Pat. No. 5,135,917 to Burch; U.S. Pat. No. 5,087,617 to Smith and Clusel et al. (1993) Nucl. Acids Res. 21:3405-3411, which describes dumbbell antisense oligonucleotides). Triplex molecules refer to single DNA strands that target duplex DNA and thereby prevent transcription (see, e.g., U.S. Pat. No. 5,176,996, which describes methods for making synthetic oligonucleotides that bind to target sites on duplex DNA).

### (b) Ribozymes

[0706] Ribozymes are RNA constructs that specifically cleave messenger RNA. There are at least five classes of ribozymes that are known that are involved in the cleavage and/or ligation of RNA chains. Ribozymes can be targeted to any RNA transcript and can catalytically cleave such transcript (see, e.g., U.S. Pat. Nos. 5,272,262; 5,144,019 5,168,053; 5,180,818; 5,116,742 and 5,093,246, which describe ribozymes and methods for production thereof). Any such ribosome may be linked to a conditionally active anti-EGFR antibody for delivery to EGFR bearing cells under acidic conditions.

[0707] The ribozymes may be delivered to the targeted cells as DNA encoding the ribozyme linked to a eukaryotic promoter, such as a eukaryotic viral promoter, generally a late promoter, such that upon introduction into the nucleus, the ribozyme will be directly transcribed. In such instances, the construct will also include a nuclear translocation sequence, generally as part of the targeting agent or as part of a linker in order to render it suitable for delivering linked nucleic acids to the nucleus.

### (c) Nucleic Acids Encoding Therapeutic Products for Targeted Delivery

[0708] Among the DNA that encodes therapeutic products contemplated for use is DNA encoding correct copies anticancer agents, such as tumor necrosis factors, and cytotoxic agents, such as shiga A1 toxin or saporin to EGFR bearing tumor cells. The conjugate should include a nuclear translocation sequence (NTS). If the conjugate is designed such that the targeting agent and linked DNA is cleaved in the cytoplasm, then the NTS should be included in a portion of the linker that remains bound to the DNA, so that, upon internalization, the conjugate will be trafficked to the nucleus. The nuclear translocation sequence (NTS) may be a heterologous sequence or a may be derived from the selected chemokine receptor targeting agent. A typical consensus NTS sequence contains an amino-terminal proline or glycine followed by at least three basic residues in an array of seven to nine amino acids (see, e.g., Dang et al. (1989) J. Biol. Chem. 264:18019-18023).

### (d) Coupling of Nucleic Acids to Proteins

[0709] To effect chemical conjugation herein, the targeting agent is linked to the nucleic acid either directly or via one or more linkers. Methods for conjugating nucleic acids, at the 5′ ends, 3′ ends and elsewhere, to the amino and carboxyl termini and other sites in proteins are known to those of skill in the art (for a review see e.g., Goodchild, (1993) In: Perspectives in Bioconjugate Chemistry, Mears, Ed., American Chemical Society, Washington, D.C. pp. 77-99). For example, proteins have been linked to nucleic acids using ultraviolet irradiation (Sperling et al. (1978) Nucleic Acids Res. 5:2755-2773; Fiser et al. (1975) FEBS Lett. 52:281-283), bifunctional chemicals (Bäumert et al. (1978) Eur. J. Biochem. 89:353-359; and Oste et al. (1979) Mol. Gen. Genet. 168:81-86), and photochemical cross-linking (Vanin et al. (1981) FEBS Lett. 124:89-92; Rinke et al. (1980) J. Mol. Biol. 137:301-304; Millon et al. (1980) Eur. J. Biochem. 110:485-492).

[0710] In particular, the reagents (N-acetyl-N′-(p-glyoxylylbenzolyl)cystamine and 2-iminothiolane have been used to couple DNA to proteins, such as α₂-macroglobulin (α₂M) via mixed disulfide formation (see, Cheng et al. (1983) Nucleic Acids Res. 11:659-669). N-acetyl-N′-(p-glyoxylylbenzolyl)cystamine reacts specifically with non-paired guanine residues and, upon reduction, generates a free sulfhydryl group. 2-Iminothiolane reacts with proteins to generate sulfhydryl groups that are then conjugated to the derivatized DNA by an intermolecular disulfide interchange reaction. Any linkage may be used provided that, upon internalization of the conjugate the targeted nucleic acid is active. Thus, it is expected that cleavage of the linkage may be necessary, although it is contemplated that for some reagents, such as DNA encoding ribozymes linked to promoters or DNA encoding therapeutic agents for delivery to the nucleus, such cleavage may not be necessary.

[0711] Thiol linkages readily can be formed using heterobifunctional reagents Amines have also been attached to the terminal 5′ phosphate of unprotected oligonucleotides or nucleic acids in aqueous solutions by reacting the nucleic acid with a water-soluble carbodiimide, such as 1-ethyl-3′[3-dimethylaminopropyl]carbodiimide (EDC) or N-ethyl-N′(3-dimethylaminopropylcarbodiimidehydrochloride (EDCI), in imidazole buffer at pH 6 to produce the 5′ phosphorimidazolide. Contacting the 5′ phosphorimidazolide with amine-containing molecules and ethylenediamine, results in stable phosphoramidates (see, e.g., Chu et al. (1983) Nucleic Acids Res. 11:6513-6529; and WO 88/05077). In particular, a solution of DNA is saturated with EDC, at pH 6 and incubated with agitation at 4° C. overnight. The resulting solution is then buffered to pH 8.5 by adding, for example about 3 volumes of 100 mM citrate buffer, and adding about 5 μg-about 20 μg of a chemokine receptor targeting agent, and agitating the resulting mixture at 4° C. for about 48 hours. The unreacted protein may be removed from the mixture by column chromatography using, for example, SEPHADEX G75 (Pharmacia) using 0.1 M ammonium carbonate solution, pH 7.0 as an eluting buffer. The isolated conjugate may be lyophilized and stored until used.

[0712] U.S. Pat. No. 5,237,016 provides methods for preparing nucleotides that are bromacetylated at their 5′ termini and reacting the resulting oligonucleotides with thiol groups. Oligonucleotides derivatized at their 5′-termini bromoacetyl groups can be prepared by reacting 5′-aminohexyl-phosphoramidate oligonucleotides with bromoacetic acid-N-hydroxysuccinimide ester as described in U.S. Pat. No. 5,237,016. U.S. Pat. No. 5,237,016 also describes methods for preparing thiol-derivatized nucleotides, which can then be reacted with thiol groups on the selected growth factor. Briefly, thiol-derivatized nucleotides are prepared using a 5′-phosphorylated nucleotide in two steps: (1) reaction of the phosphate group with imidazole in the presence of a diimide and displacement of the imidazole leaving group with cystamine in one reaction step; and (2) reduction of the disulfide bond of the cystamine linker with dithiothreitol (see, also, Chu et al. (1988) Nucl.

[0713] Acids Res. 16:3671-3691, which describes a similar procedure). The 5′-phosphorylated starting oligonucleotides can be prepared by methods known to those of skill in the art (see, e.g., Maniatis et al. (1982) Molecular Cloning: A Laboratory Manual, Cold Spring Harbor Laboratory, New York, p. 122).

[0714] The antisense oligomer or nucleic acid, such as a methylphosphonate oligonucleotide (MP-oligomer), may be derivatized by reaction with SPDP or SMPB. The resulting MP-oligomer may be purified by HPLC and then coupled to the chemokine receptor targeting agent. The MP-oligomer (about 0.1 μM) is dissolved in about 40-50 μl of 1:1 acetonitrile/water to which phosphate buffer (pH 7.5, final concentration 0.1 M) and a 1 mg MP-oligomer in about 1 mL phosphate buffered saline is added. The reaction is allowed to proceed for about 5-10 hours at room temperature and is then quenched with about 15 μL 0.1 iodoacetamide. The conjugates can be purified on heparin sepharose Hi Trap columns (1 mL, Pharmacia) and eluted with a linear or step gradient. The conjugate should elute in 0.6 M NaCl.

[0715] b. Linkers

[0716] The linker, L, attaches the antibody to a targeted agent through covalent bond(s). The linker is a bifunctional or multifunctional moiety which can be used to link one or more targeted agent(s) to the anti-EGFR antibody to form an antibody-drug conjugate (ADC). ADCs can be readily prepared using a linker having reactive functionality for binding to the targeted agent and to the anti-EGFR antibody. A cysteine thiol group, or an amine group, e.g., N-terminus or lysine side chain, of the anti-EGFR antibody can form a bond with a functional group of a linker reagent, targeted agent or targeted agent-linker reagent.

[0717] Linkers are preferably stable in the extracellular environment so that the antibody-drug conjugate (ADC) is stable and remains intact, i.e., the antibody remains linked to the targeted agent, before transport or delivery into the target cell. Thus, the linkers are stable outside the target cell and may be cleaved or enable dissociation of the antibody and targeted agent at some efficacious rate once inside the cell. Contemplated linkers will (i) not interfere with the specific binding properties of the antibody; (ii) permit intracellular delivery of the conjugate or targeted agent; (iii) remain stable and intact, i.e., not cleaved, until the conjugate has been delivered or transported to its targeted site; and (iv) not interfere with the cytotoxic, cell-killing effect or a cytostatic effect of the targeted agent. Stability of the ADC may be measured by standard analytical techniques such as mass spectrometry and/or HPLC.

[0718] Linkers have two reactive functional groups to permit covalent attachment to both the antibody and the targeted agent, and thus exhibit bivalency in a reactive sense. Such chemical cross-linking reagents, which are useful for attaching two or more functional or biologically active moieties, such as peptides, nucleic acids, drugs, toxins, antibodies, haptens, and reporter groups, are known, and methods have been described for their use in generating conjugates (Hermanson, G. T. (1996) Bioconjugate Techniques; Academic Press: New York, p 234-242).

[0719] In some examples, a linker has a reactive functional group which has a nucleophilic group that is reactive to an electrophilic group present on an antibody. Useful electrophilic groups on an antibody include, but are not limited to, aldehyde and ketone carbonyl groups. The heteroatom of a nucleophilic group of a linker can react with an electrophilic group on an antibody and form a covalent bond to an antibody unit. Useful nucleophilic groups on a linker include, but are not limited to, hydrazide, oxime, amino, hydrazine, thiosemicarbazone, hydrazine carboxylate, and arylhydrazide. The electrophilic group on an antibody provides a convenient site for attachment to a linker.

### i. Peptide Linkers

[0720] Linkers can be peptidic, comprising one or more amino acid units. Peptide linker reagents may be prepared by solid phase or liquid phase synthesis methods (E. Schroder and K. Lubke, The Peptides, volume 1, pp. 76-136 (1965) Academic Press) that are well-known in the field of peptide chemistry, including t-BOC chemistry (Geiser et al. “Automation of solid-phase peptide synthesis” in Macromolecular Sequencing and Synthesis, Alan R. Liss, Inc., 1988, pp. 199-218) and Fmoc/HBTU chemistry (Fields, G. and Noble, R. (1990) “Solid phase peptide synthesis utilizing 9-fluorenylmethoxycarbonyl amino acids”, Int. J. Peptide Protein Res. 35:161-214), on an automated synthesizer such as the Rainin Symphony Peptide Synthesizer (Protein Technologies, Inc.), or Model 433 (Applied Biosystems). Peptide-based linkers offer advantages over linkers that are hydrolytically or reductively labile, since proteolysis is enzymatic, and the enzymes can be selected for preferential expression within tumor cells. The cathepsin B-cleavable peptide linker, valine-citrulline (Val-Cit), and modifications thereof such as maleimidocaproyl-valine-citrulline (mc-vc), phenylalanine-lysine, Ala-Leu-Ala-Ala (SEQ ID NO: 351), other tri/tetrapeptides are exemplary peptide linkers that have been employed in ADCs (Dosio et al., (2010) Toxins 3:848-883; Doronina et al., (2006) Bioconjug Chem. 17:114-124; Doronina et al., (2003) Nat Biotechnol. 21:778-784; Sanderson et al., (2005) Clin Cancer Res 11:843-852; Ducry and Stump (2010) Bioconjug Chem. 21:5-13). Exemplary non-cleavable peptide linkers include N-methyl-valine-citrulline. Other peptide linkers are described in U.S. Publication No. 2011/0020343.

[0721] Preferred peptide linkers are those that can be incorporated in fusion proteins and expressed in a host cell, such as E. coli. Such linkers include: enzyme substrates, such as cathepsin B substrate, cathepsin D substrate, trypsin substrate, thrombin substrate, subtilisin substrate, Factor Xa substrate, and enterokinase substrate; linkers that increase solubility, flexibility, and/or intracellular cleavability include linkers, such as (glyₘser)ₙ and (serₘgly)ₙ, where m is 1 to 6, preferably 1 to 4, more preferably 2 to 4, and n is 1 to 6, preferably 1 to 4, more preferably 2 to 4 (see, e.g., International PCT application No. WO 96/06641, which provides exemplary linkers for use in conjugates). In some embodiments, several linkers may be included in order to take advantage of desired properties of each linker.

### ii. Chemical Linkers

[0722] ADCs also can be prepared using linkers that are non-cleavable moieties or chemical cross-linking reagents. Exemplary non-cleavable linkers include amide linkers and amide and ester linkages with succinate spacers (Dosio et al., (2010) Toxins 3:848-883). Exemplary chemical cross-linking linkers include, but are not limited to, SMCC (Succinimidyl-4-(N-maleimidomethyl)cyclohexane-1-carboxylate) and SIAB (Succinimidyl (4-iodoacetyl)aminobenzoate). SMCC is an amine-to-sulfhydryl crosslinker that contains NHS-ester and maleimide reactive groups at opposite ends of a medium-length cyclohexane-stabilized spacer arm. SIAB is a short, NHS-ester and iodoacetyl crosslinker for amine-to-sulfhydryl conjugation. Other exemplary cross-linking reagents include, but are not limited to, thioether linkers, chemically labile hydrazone linkers, 4-mercaptovaleric acid, BMPEO, BMPS, EMCS, GMBS, HBVS, LC-SMCC, MBS, MPBH, SBAP, SIA, SMPB, SMPH, sulfo-EMCS, sulfo-GMBS, sulfo-KMUS, sulfo-MBS, sulfo-SIAB, sulfo-SMCC, and sulfo-SMPB, and SVSB (succinimidyl-(4-vinylsulfone)benzoate), and bis-maleimide reagents, such as DTME, BMB, BMDB, BMH, BMOE, BM(PEO)₃, and BM(PEO)₄, which are commercially available (Pierce Biotechnology, Inc.). Bis-maleimide reagents allow the attachment of a free thiol group of a cysteine residue of an antibody to a thiol-containing targeted agent, or linker intermediate, in a sequential or concurrent fashion. Other thiol-reactive functional groups, besides maleimide, include iodoacetamide, bromoacetamide, vinyl pyridine, disulfide, pyridyl disulfide, isocyanate, and isothiocyanate. Other exemplary linkers and methods of use are described in U.S. Publication No. 2005/0276812 and in Ducry and Stump (2010) Bioconjug Chem. 21:5-13.

[0723] Linkers optionally can be substituted with groups which modulate solubility or reactivity. For example, a sulfonate substituent may increase water solubility of the reagent and facilitate the coupling reaction of the linker reagent with the antibody or the drug moiety, or facilitate the coupling reaction of the anti-EGFR Ab-L with the targeted agent, or targeted agent-L with the anti-EGFR Ab, depending on the synthetic route employed to prepare the ADC.

[0724] Other linker reagents can also be obtained via commercial sources, such as Molecular Biosciences Inc. (Boulder, Colo.), or synthesized in accordance with procedures described in Toki et al. (2002) J. Org. Chem. 67:1866-1872; U.S. Pat. No. 6,214,345; WO 02/088172; U.S. 2003130189; U.S. 2003096743; WO 03/026577; WO 03/043583; and WO 04/032828. For example, linker reagents such as DOTA-maleimide (4-maleimidobutyramidobenzyl-DOTA) can be prepared by the reaction of aminobenzyl-DOTA with 4-maleimidobutyric acid (Fluka) activated with isopropylchloroformate (Aldrich), following the procedure of Axworthy et al. (2000) Proc. Natl. Acad. Sci. USA 97(4):1802-1807). DOTA-maleimide reagents react with the free cysteine amino acids of the cysteine engineered antibodies and provide a metal complexing ligand on the antibody (Lewis et al. (1998) Bioconj. Chem. 9:72-86). Chelating linker labelling reagents such as DOTA-NHS (1,4,7,10-tetraazacyclododecane-1,4,7,10-tetraacetic acid mono (N-hydroxysuccinimide ester) are commercially available (Macrocyclics, Dallas, Tex.).

[0725] The Linker can be a dendritic type linker for covalent attachment of more than one drug moiety through a branching, multifunctional linker moiety to an antibody (Sun et al. (2002) Bioorganic & Medicinal Chemistry Letters 12:2213-2215; Sun et al. (2003) Bioorganic & Medicinal Chemistry 11:1761-1768; King et al. (2002) Tetrahedron Letters 43:1987-1990). Dendritic linkers can increase the molar ratio of targeted agent to antibody, i.e., loading, which can increase the potency of the ADC. Thus, where an antibody bears only one reactive cysteine thiol group, a multitude of drug moieties may be attached through a dendritic linker. Exemplary dendritic linker reagents are described in U.S. Patent Publication No. 2005/0276812.

[0726] c. Exemplary Conjugates

[0727] Provided herein are Y104E- and Y104D-anti-EGFR antibody conjugates containing any of the anti-EGFR antibodies provided herein linked directly or indirectly to a cytotoxic moiety that is an auristatin or maytansinoid. The antibody conjugates have the formula (Ab), (L)_{q}, and (targeted agent)ₘ, wherein antibody (Ab) is the variant Y104E- or Y104D-anti-EGFR antibody or antigen-binding fragment thereof that binds to EGFR; L is a linker for linking the Ab to the targeted agent; the targeted agent is an auristatin or maytansinoid, m is at least 1; q is 0 or more as long as the resulting conjugate binds to the EGFR. In some examples, m is 1 to 8 and q is 0 to 8. Typically, the orientation of components in the conjugate is Ab-[(L)_{q}-(targeted agent)ₘ], whereby the Ab is linked indirectly to the targeted agent, i.e. an auristatin or a maytansinoid, via a linker. Generally, m and q are each independently from 2 to 6. In particular examples, m and q are the same, such that the resulting conjugate has the formula Ab-[(L)-(targeted agent)ₚ], where p is from 2 to 6, such as generally at least or about 2, 3, 4, 5 or 6.

[0728] i. Anti-EGFR Antibody-Auristatin Conjugates

[0729] Provided herein are antibody conjugates Y104E- and Y104D-anti-EGFR antibody conjugates containing any of the anti-EGFR antibodies provided herein linked directly or indirectly to an auristatin cytotoxic moiety. In such examples, the antibody conjugate has the formula (Ab), (L)_{q}, and (auristatin)ₘ, wherein antibody (Ab) is the variant Y104E- or Y104D-anti-EGFR antibody or antigen-binding fragment thereof that binds to EGFR, L is a linker for linking the Ab to the auristatin, m is at least 1 (e.g. m is 1 to 8) and q is 0 or more (e.g. 0 to 8) as long as the resulting conjugate binds to the EGFR. Typically, the orientation of components in the conjugate is Ab-[(L)_{q}-(auristatin)ₘ], whereby the Ab is linked indirectly to the auristatin agent via a linker. In particular examples, m and q are the same, such that the resulting conjugate has the formula Ab-[(L)-(auristatin)]ₚ, where p is from 2 to 6, such as generally at least or about 2, 3, 4, 5 or 6.

[0730] In the examples, the antibody component can be any anti-EGFR antibody described herein, or antigen-binding fragment thereof. In one example, the antibody component can be a Y104E-variant antibody, such as any set forth in subsection C.1 and C.2 above. In particular, exemplary of a Y104E-variant anti-EGFR antibody in the auristatin-containing conjugates provided herein is an antibody containing the heavy chain set forth in SEQ ID NO: 72 and the light chain set forth in SEQ ID NO: 8, or an antigen-binding fragment thereof that contains the variable heavy chain corresponding to amino acids 1-119 of SEQ ID NO: 72 (i.e., set forth in SEQ ID NO: 74) and the variable light chain corresponding to amino acids 1-107 of SEQ ID NO: 8 (i.e. set forth in SEQ ID NO: 9), or antibodies that contain a heavy chain and/or light chain, or portion thereof, that exhibit at least 75%, 80%, 81%, 82%, 83%, 84%, 85%, 86%, 86%, 88%, 89%, 90%, 91%, 92%, 93%, 94%, 95%, 96%, 97%, 98%, 99% or more sequence identity thereto and that contains the amino acid replacement Y104E in the variable heavy chain, or humanized forms thereof. For example, the Y104E-variant anti-EGFR antibody in the auristatin-containing conjugate contains variant Y104E antibody provided herein such as any set forth in Tables 7, 9 or Table 10, or an antigen-binding fragment thereof that contains the variable heavy chain corresponding to amino acids 1-119 of the respective heavy chain and the variable light chain corresponding to amino acids 1-107 of the respective light chain. As an example, the Y104E-variant anti-EGFR antibodies in the auristatin-containing conjugate contains a humanized Y104E antibody designated E-h containing the heavy chain set forth in SEQ ID NO: 59 and a light chain set forth in SEQ ID NO: 181, or an antigen-binding fragment thereof that contains the variable heavy chain corresponding to amino acids 1-119 of SEQ ID NO: 59 and a variable light chain corresponding to amino acids 1-107 of SEQ ID NO: 181. The antibody component can be a full-length antibody or an antigen-binding fragment, such as an Fab, Fab′, F(ab′)₂, single-chain Fv (scFv), Fv, dsFv, diabody, Fd and Fd′ fragment.

[0731] In another example, the antibody component can be a Y104D-variant antibody, such as any set forth in subsection C.3. In particular, exemplary of a Y104D-variant anti-EGFR antibody in the auristatin-containing conjugates provided herein is an antibody containing the heavy chain set forth in SEQ ID NO: 67 and the light chain set forth in SEQ ID NO: 8, or an antigen-binding fragment thereof that contains the variable heavy chain corresponding to amino acids 1-119 of SEQ ID NO: 67 and the variable light chain corresponding to amino acids 1-107 of SEQ ID NO: 8, or antibodies that contain a heavy chain and/or light chain, or portion thereof, that exhibit at least 75%, 80%, 81%, 82%, 83%, 84%, 85%, 86%, 86%, 88%, 89%, 90%, 91%, 92%, 93%, 94%, 95%, 96%, 97%, 98%, 99% or more sequence identity thereto and that contains the amino acid replacement Y104D in the variable heavy chain, or humanized forms thereof. For example, exemplary of Y104D-variant anti-EGFR antibodies in the auristatin-containing conjugates provided herein are any set forth in Table 11, or an antigen-binding fragment thereof that contains the variable heavy chain corresponding to amino acids 1-119 of the respective heavy chain and the variable light chain corresponding to amino acids 1-107 of the respective light chain. As an example, the Y104D-variant anti-EGFR antibodies in the auristatin-containing conjugate contains a humanized Y104D antibody designated D-h containing the heavy chain set forth in SEQ ID NO: 57 and a light chain set forth in SEQ ID NO: 181, or an antigen-binding fragment thereof that contains the variable heavy chain corresponding to amino acids 1-119 of SEQ ID NO: 57 and a variable light chain corresponding to amino acids 1-107 of SEQ ID NO: 181. The antibody component can be a full-length antibody or an antigen-binding fragment, such as an Fab, Fab′, F(ab′)₂, single-chain Fv (scFv), Fv, dsFv, diabody, Fd and Fd′ fragment.

[0732] The auristatin in the conjugates can be any described known in the art, including any described in subsection C.4.a.ii. See also, published International PCT Application No. WO2012054748 and U.S. patent application No. US2011/0020343. In one example, the auristatin is MMAE that has the structure:

[chemical structure]

or a pharmaceutically acceptable salt form thereof. In another example, the auristatin is MMAF that has the structure:

[chemical structure]

or a pharmaceutically acceptable salt form thereof.

[0733] In any of such examples, the linker can be any linker described above in subsection C.4.b. Typically, the linker is a linker that is capable of reacting with a sulfydryl group on the antibody. The linker can have the formula Aₐ-Y_{y}-Z_{z}-Xₓ or a pharmaceutically acceptable salt thereof, where A is a bridge unit capable of reacting with a sulfhydryl group of the antibody; a is 0 or 1; each of Y and Z is independently an amino acid unit; each of y and z is independently an integer ranging from 0 to 12; X is a Spacer unit; and X is 0, 1 or 2.

[0734] In such examples, the bridge unit is capable of linking the antibody to the amino acid Y or W, if present, to a Spacer Unit X, if present, or to the targeted agent. In such examples, a sulfhydryl group on the antibody is a functional group that can react with the bridge unit. In one example, the sulfhydryl group can be generated by reduction of the intramolecular disulfide bonds of the antibody. Disulfides can be reduced, for example, with dithiothreitol, mercaptoethanol, or tris(2-carboxyethyl)phosphine using standard methods. In another example, sulfhydryl group can be generated by reaction of an amino group of a lysine moiety of the antibody with 2-iminothiolane (Traut's reagent) or other sulfhydryl generating reagent. Reactive linkers that can form a bond with a sulfur atom of the antibody are known in the art (see e.g. published International PCT Application No. WO2012054748 and WO2005/007197).

[0735] In one example, the functional or reactive moiety of the bridge unit includes those that are broadly selective for thiol groups, such as iodoacetamide, maleimide, vinylsulfone, vinyl pyridines and acrylate and methacrylate esters. Such a thiol selective conjugating moieties can yield a single thioether conjugating bond with the antibody. For example, the bridge can contain a reactive group that is a maleimide. In particular examples, the bridge unit is maleimidocaproyl (MC) or maleimidopropanoyl (MP).b For example, the bridge contains a

[0736] In another example, the reactive moiety of the bridge unit is a bifunctional linker that maintains the interchain disulfide bonding of the antibody. For example, the bridge unit can contain a bifunctional pyrrole-2,5-dione- and pyrrolidine-2,5-dione-based linkers as described in published U.S. patent application No. US2013/0224228. In such an example, reaction of the bifunctional linker with the two cysteines gives a “stapled” dithiosuccinimide or dithiomaleimide antibody conjugate with one linker per disulfide connected through two thioether bonds. In another example, a bifunctional linker can be a bis-thiol alkylating reagent as described in International PCT Application No. WO2005/007197. The bis-thiol alkylating reagent can undergo bis-alkylation to link to both cysteine thiols derived from the reduced disulfide. Once formed, the reagent can undergo interactive Michael and retro-Michael reactions to allow the product to be formed in which two free thiols can re-anneal across a 3-carbon bridge. In one example, the bis-thiol alkylating reagent has the structure:

[chemical structure]

[0737] where, (CH₂CH₂O)ₙ is a hydrophilic PEG spacer. For example, the bis-thiol alkylating reagent can be 4-(3-tosyl-2-(tosylmethyl)propanoyl)benzamide-PEG having the structure:

[chemical structure]

[0738] In any of the examples of an auristatin-based conjugate, the amino acid Y and Z, if each independently present, can be a natural or non-natural amino acid. For example, Y and Z, if each independently present, can be an amino acid that is alanine, valine, leucine, isoleucine, methionine, phenylalanine, tryptophan or proline. The Y-Z can represent an amino acid unit that is a dipeptide, tripeptide, tetrapeptide, pentapeptide or higher unit peptide. The amino acid unit can be enzymatically cleaved by one or more enzymes, including a cancer or tumor-associated protease, to liberate the targeted agent. For example, the Y can be an amino acid that is alanine, valine, leucine, isoleucine, methionine, phenylalanine, tryptophan or proline and the Z can be lysine, lysine protected with acetyl or formyl, arginine, arginine protected with tosyl or nitro groups, histidine, ornithine, ornithine protected with acetyl or formyl or citrulline. In particular examples, Y-Z is phenylalanine-lysine, valine-citrulline or valine-lysine.

[0739] In the linker, X is a spacer unit. The spacer unit can be non-self-immolative or self-immolative. A non-self-immolative Spacer unit is one in which part or all of the Spacer unit remains bound to the targeted agent after cleavage, for example enzymatic cleavage of an amino acid unit Y-Z, from the antibody drug conjugate. Examples of a non-self-immolative Spacer unit include, but are not limited to a (glycine-glycine) Spacer unit and a glycine Spacer unit. In some examples, Spacer unit (—X—) is -Gly-. In other examples, Spacer unit (—X—) is -Gly-Gly-. In other cases, the Spacer unit is a bifunctional chemical moiety that is capable of covalently linking together two spaced chemical moieties into a stable tripartite molecule. It will spontaneously separate from the second chemical moiety if its bond to the first moiety is cleaved. For example, the Spacer Unit (—X—)can be a p-aminobenzyl alcohol (PAB). The Spacer Unit (—X—) also can be an aromatic compound that is electronically similar to PAB, such as 2-aminoimidazol-5-methanol derivatives (Hay et al. (1999) Bioorg. Med. Chem. Lett. 9:2237) and ortho or para-aminobenzylacetals. Spacers can be used that undergo cyclization upon amide bond hydrolysis, such as substituted and unsubstituted 4-aminobutyric acid amides (Rodrigues et ah (1995) Chemistry Biology 2:223), appropriately substituted bicyclo[2.2.1] and bicyclo[2.2.2] ring systems (Storm et. al (1972). Amer. Chem. Soc. 94:5815) and 2-aminophenylpropionic acid amides (Amsberry et. al (1990) Org. Chem. 55:5867). In particular, the spacer contains a p-amino benzyl having the following structure:

[chemical structure]

[0740] In particular examples of the conjugates provided herein, the linker L is 6-maleimidocaproyl-valine-citrulline-p-aminobenzyloxycarbonyl (MC-vc-PAB) or 4-(3-tosyl-2-(tosylmethyl)propanoyl)benzamide-valine-citruline-p-aminobenzyloxycarbonyl.

[0741] In one example, among the Y104D- or Y104E-variant anti-EGFR antibody conjugates provided herein is a conjugate in which the targeted agent is MMAF and L-(targeted agent) has the structure:

[chemical structure]

[0742] In another example, among the Y104D- or Y104E-variant anti-EGFR antibody conjugates provided herein is a conjugate in which the targeted agent is MMAE and L-(targeted agent) has the structure:

[chemical structure]

[0743] In a further example, among the Y104D- or Y104E-variant anti-EGFR antibody conjugates provided herein is a conjugate in which the targeted agent is MMAE and L-(targeted agent) has the structure:

[chemical structure]

[0744] In any of such examples, m and q are the same and the conjugate has the formula: Ab-[(L)-(targeted agent)]ₚ. For example, p can be 2 to 6, such as generally about or at least 2, 3, 4, 5 or 6. The final conjugate contains 2 to 6 auristatin (e.g. MMAE or MMAF) molecules per antibody, such as generally about or at least 2, 3, 4, 5 or 6.

[0745] ii. Anti-EGFR Antibody-Maytansinoid Conjugates

[0746] Provided herein are antibody conjugates Y104E- and Y104D-anti-EGFR antibody conjugates containing any of the anti-EGFR antibodies provided herein linked directly or indirectly to a maytansinoid cytotoxic moiety. In such examples, the antibody conjugate has the formula (Ab), (L)_{q}, and (maytansinoid)ₘ, wherein antibody (Ab) is the variant Y104E- or Y104D-anti-EGFR antibody or antigen-binding fragment thereof that binds to EGFR, L is a linker for linking the Ab to the maytansinoid, m is at least 1 (e.g. m is 1 to 8) and q is 0 or more (e.g. 0 to 8) as long as the resulting conjugate binds to the EGFR. Typically, the orientation of components in the conjugate is Ab-[(L)_{q}-(maytansinoid)ₘ], whereby the Ab is linked indirectly to the maytansinoid agent via a linker. In particular examples, m and q are the same, such that the resulting conjugate has the formula Ab-[(L)-(maytansinoid)]ₚ, where p is from 2 to 6, such as generally at least or about 2, 3, 4, 5 or 6.

[0747] In the examples, the antibody component can be any anti-EGFR antibody described herein, or antigen-binding fragment thereof. In one example, the antibody component can be a Y104E-variant antibody, such as any set forth in subsection C.1 and C.2 above. In particular, exemplary of a Y104E-variant anti-EGFR antibody in the maytansinoid-containing conjugates provided herein is an antibody containing the heavy chain set forth in SEQ ID NO: 72 and the light chain set forth in SEQ ID NO: 8, or an antigen-binding fragment thereof that contains the variable heavy chain corresponding to amino acids 1-119 of SEQ ID NO: 72 (i.e., set forth in SEQ ID NO: 74) and the variable light chain corresponding to amino acids 1-107 of SEQ ID NO: 8 (i.e., set forth in SEQ ID NO: 9), or antibodies that contain a heavy chain and/or light chain, or portion thereof, that exhibit at least 75%, 80%, 81%, 82%, 83%, 84%, 85%, 86%, 86%, 88%, 89%, 90%, 91%, 92%, 93%, 94%, 95%, 96%, 97%, 98%, 99% or more sequence identity thereto and that contains the amino acid replacement Y104E in the variable heavy chain, or humanized forms thereof. For example, the Y104E-variant anti-EGFR antibody in the maytansinoid-containing conjugate contains variant Y104E antibody provided herein such as any set forth in Tables 7, 9 or Table 10, or an antigen-binding fragment thereof that contains the variable heavy chain corresponding to amino acids 1-119 of the respective heavy chain and the variable light chain corresponding to amino acids 1-107 of the respective light chain. As an example, the Y104E-variant anti-EGFR antibodies in the maytansinoid-containing conjugate contains a humanized Y104E antibody designated E-h containing the heavy chain set forth in SEQ ID NO: 59 and a light chain set forth in SEQ ID NO: 181, or an antigen-binding fragment thereof that contains the variable heavy chain corresponding to amino acids 1-119 of SEQ ID NO: 59 and a variable light chain corresponding to amino acids 1-107 of SEQ ID NO: 181. The antibody component can be a full-length antibody or an antigen-binding fragment, such as an Fab, Fab′, F(ab′)₂, single-chain Fv (scFv), Fv, dsFv, diabody, Fd and Fd′ fragment.

[0748] In another example, the antibody component can be a Y104D-variant antibody, such as any set forth in subsection C.3. In particular, exemplary of a Y104D-variant anti-EGFR antibody in the maytansinoid-containing conjugates provided herein is an antibody containing the heavy chain set forth in SEQ ID NO: 67 and the light chain set forth in SEQ ID NO: 8, or an antigen-binding fragment thereof that contains the variable heavy chain corresponding to amino acids 1-119 of SEQ ID NO: 67 and the variable light chain corresponding to amino acids 1-107 of SEQ ID NO: 8, or antibodies that contain a heavy chain and/or light chain, or portion thereof, that exhibit at least 75%, 80%, 81%, 82%, 83%, 84%, 85%, 86%, 86%, 88%, 89%, 90%, 91%, 92%, 93%, 94%, 95%, 96%, 97%, 98%, 99% or more sequence identity thereto and that contains the amino acid replacement Y104D in the variable heavy chain, or humanized forms thereof. For example, exemplary of Y104D-variant anti-EGFR antibodies in the maytansinoid-containing conjugates provided herein are any set forth in Table 11, or an antigen-binding fragment thereof that contains the variable heavy chain corresponding to amino acids 1-119 of the respective heavy chain and the variable light chain corresponding to amino acids 1-107 of the respective light chain. As an example, the Y104D-variant anti-EGFR antibodies in the maytansinoid-containing conjugate contains a humanized Y104D antibody designated D-h containing the heavy chain set forth in SEQ ID NO: 57 and a light chain set forth in SEQ ID NO: 181, or an antigen-binding fragment thereof that contains the variable heavy chain corresponding to amino acids 1-119 of SEQ ID NO: 57 and a variable light chain corresponding to amino acids 1-107 of SEQ ID NO: 181. The antibody component can be a full-length antibody or an antigen-binding fragment, such as an Fab, Fab′, F(ab′)₂, single-chain Fv (scFv), Fv, dsFv, diabody, Fd and Fd′ fragment.

[0749] The maytansinoid in the conjugates can be any known in the art, including any described in subsection C.4.a.i See also, U.S. Pat. No. 7,097,840; EP1928503. Maytansinoids are well known in the art and can be synthesized by known techniques or isolated from natural sources. Suitable maytansinoids are disclosed, for example, in U.S. Pat. No. 5,208,020 and in the other patents and nonpatent publications referred to hereinabove. In particular, maytansinoids are maytansinol and maytansinol analogs modified in the aromatic ring or at other positions of the maytansinol molecule, such as various maytansinol esters.

[0750] Exemplary of a maytansinoid is DM1 having the following structure:

[chemical structure]

In the structure, “R” can be occupied by a variant of groups capable of forming a chemical bond with a selected linker. For example, “R” can be SH or can be SSR₁, where R₁ represents methyl, linear alkyl, branched alkyl, cyclic alkyl, simple or substituted aryl or heterocyclic. Typically, “R” is an SH group or a protected derivative thereof, which forms an S—S bond with a linker. For example,
to form the maytansinoid DM1, the side chain at the C-3 hydroxyl group of maytansine is modified to have a free sulfhydryl group (SH). This thiolated form of maytansine can react with a modified antibody to form a conjugate.

[0751] In any of such examples, the linker can be any linker described above in subsection C.4.b. The linker typically is a bifunctional crosslinking agent, and the antibody is modified by reacting the bifunctional crosslinking reagent with the antibody, thereby resulting in the covalent attachment of a linker molecule to the antibody. Exemplary linkers include, but are not limited to, N-succinimidyl-3-(2-pyridyldithio) propionate (SPDP), succinimidyl-4-(N-maleimidomethyl)cyclohexane-1-carboxylate (SMCC), iminothiolane (IT), bifunctional derivatives of imidoesters (such as dimethyl adipimidate HCL), active esters (such as disuccinimidyl suberate), aldehydes (such as glutaraldehyde), bis-azido compounds (such as bis(p-azidobenzoyl) hexanediamine), bis-diazonium derivatives (such as bis-(p-diazoniumbenzoyl)-ethylenediamine), diisocyanates (such as toluene 2,6-diisocyanate), and bis-active fluorine compounds (such as 1,5-difluoro-2,4-dinitrobenzene). For example, linkers can include N-succinimidyl-3-(2-pyridyldithio) propionate (SPDP) (Carlsson et al., Biochem. J. 173:723-737 [1978]) and N-succinimidyl-4-(2-pyridylthio)pentanoate (SPP) to provide for a disulfide linkage. The linker can be a cleavable or non-cleavable linker. Exemplary of a non-cleavable linker succinimidyl-4-(N-maleimidomethyl)cyclohexane-1-carboxylate (SMCC).

[0752] For example, among the Y104D- or Y104E-variant anti-EGFR antibody conjugates provided herein is a conjugate in which the targeted agent is DM1 and L-(targeted agent) has the structure:

[chemical structure]

[0753] In such examples, m and q are the same and the conjugate has the formula: Ab-[(L)-(targeted agent)]ₚ. For example, p can be 2 to 6, such as generally about or at least 2, 3, 4, 5 or 6. The final conjugate contains 2 to 6 DM1 molecules per antibody, such as generally about or at least 2, 3, 4, 5 or 6.

### D. METHODS OF PRODUCING ANTI-EGFR ANTIBODIES

[0754] 1. Generating and Producing Anti-EGFR Antibodies

[0755] Anti-EGFR antibodies, such as the modified anti-EGFR antibodies provided herein, can be expressed using standard cell culture and other expression systems known in the art. Prior to use in the methods provided herein, the proteins can be purified. Alternatively, whole supernatant or diluted supernatant can be used in the methods provided herein. The modified anti-EGFR antibodies provided herein can be produced by recombinant DNA methods that are within the purview of those skilled in the art. DNA encoding a modified anti-EGFR antibody can be synthetically produced or can be readily isolated and sequenced using conventional procedures (e.g., by using oligonucleotide probes that are capable of binding specifically to genes encoding the heavy and light chains of the antibody). For example, any cell source known to produce or express a modified anti-EGFR antibody can serve as a preferred source of such DNA. In another example, once the sequence of the DNA encoding the modified anti-EGFR is determined, nucleic acid sequences can be constructed using gene synthesis techniques.

[0756] Further, mutagenesis techniques also can be employed to generate further modified forms of an anti-EGFR antibody. The DNA also can be modified. For example, gene synthesis or routine molecular biology techniques can be used to effect insertion, deletion, addition or replacement of nucleotides. For example, additional nucleotide sequences can be joined to a nucleic acid sequence. In one example linker sequences can be added, such as sequences containing restriction endonuclease sites for the purpose of cloning the antibody gene into a vector, for example, a protein expression vector. Furthermore, additional nucleotide sequences specifying functional DNA elements can be operatively linked to a nucleic acid molecule. Examples of such sequences include, but are not limited to, promoter sequences designed to facilitate intracellular protein expression, and leader peptide sequences designed to facilitate protein secretion.

[0757] It is understood that any of the amino acid sequences provided herein can be reverse-translated, using standard methods commonly used by those skilled in the art, to generate corresponding encoding nucleic acid sequences, which can be cloned into vectors and expressed to generate the antibodies and fragments provided herein. Anti-EGFR antibodies, such as the modified anti-EGFR antibodies provided herein, can be expressed as full-length proteins or less than full length proteins. For example, antibody fragments can be expressed. Nucleic acid molecules and proteins provided herein can be made by any method known to one of skill in the art. Such procedures are routine and are well-known to the skill artisan. They include routine molecular biology techniques including gene synthesis, PCR, ligation, cloning, transfection and purification techniques. A description of such procedures is provided below.

[0758] Once isolated, the DNA can be placed into expression vectors, which are then transfected into host cells. The choice of vector can depend on the desired application. For example, after insertion of the nucleic acid, the vectors typically are used to transform host cells, for example, to amplify the protein genes for replication and/or expression thereof. In such examples, a vector suitable for high level expression is used.

[0759] For expression of antibodies, generally, nucleic acid encoding the heavy chain of an antibody is cloned into a vector and the nucleic acid encoding the light chain of an antibody is cloned into a vector. The genes can be cloned into a single vector for dual expression thereof, or into separate vectors. If desired, the vectors also can contain further sequences encoding additional constant region(s) or hinge regions to generate other antibody forms. The vectors can be transfected and expressed in host cells. Expression can be in any cell expression system known to one of skill in the art. For example, host cells include cells that do not otherwise produce immunoglobulin protein, to obtain the synthesis of antibodies in the recombinant host cells. For example, host cells include, but are not limited, to simian COS cells, Chinese hamster ovary (CHO) cells, 293FS cells, HEK293-6E cells, NSO cells or other myeloma cells. Other expression vectors and host cells are described herein.

[0760] The modified anti-EGFR antibodies provided herein can be generated or expressed as full-length antibodies or as antibodies that are less than full length, including, but not limited to, antigen-binding fragments, such as, for example, Fab, Fab′, Fab hinge, F(ab′)₂, single-chain Fv (scFv), scFv tandem, Fv, dsFv, scFv hinge, scFv hinge(ΔE) diabody, Fd and Fd′ fragments. Various techniques have been developed for the production of antibody fragments. For example, fragments can be derived via proteolytic digestion of intact antibodies (see, e.g., Morimoto et al. (1992) Journal of Biochemical and Biophysical Methods, 24:107-117; Brennan et al. (1985) Science, 229:81). Alternatively, fragments can be produced directly by recombinant host cells. For example, Fab, Fv and scFv antibody fragments can all be expressed in and secreted from host cells, such as E. coli, thereby facilitating production of large amounts of these fragments. F(ab′)₂ fragments can be produced by chemically coupling Fab′-SH fragments (Carter et al. (1992) Bio/Technology, 10:163-167), or they can be isolated directly from recombinant host cell culture. In some examples, the modified anti-EGFR antibody is a single chain Fv fragment (scFv) (e.g., WO 93/16185; U.S. Pat. Nos. 5,571,894 and 5,587,458). Fv and scFv fragments have intact combining sites but are devoid of constant regions; thus, they are suitable for reduced nonspecific binding during in vivo use. scFv fusion proteins can be constructed to attach an effector protein at either the amino- or the carboxy-terminus of an scFv. The antibody fragment can also be a linear antibody (see, e.g., U.S. Pat. No. 5,641,870). Such linear antibody fragments can be monospecific or bispecific. Other techniques for the production of antibody fragments are known to one of skill in the art.

[0761] Upon expression, antibody heavy and light chains, or fragment(s) thereof, pair by interchain disulfide bonds to form a full-length antibody or fragment thereof. For example, for expression of a full-length Ig, sequences encoding the V_{H}-C_{H}1-hinge-C_{H}2-C_{H}3 can be cloned into a first expression vector and sequences encoding the V_{L}-C_{L} domains can be cloned into a second expression vector. Upon co-expression, the full-length heavy and light chains are interlinked by disulfide bonds to generate a full-length antibody. In another example, to generate a Fab, sequences encoding a fragment containing the V_{H} and C_{H}1 regions can be cloned into a first expression vector and sequences encoding the V_{L}-C_{L} domains can be cloned into a second expression vector. Upon co-expression, the heavy chain pairs with a light chain to generate a Fab monomer.

[0762] Exemplary sequences that can be inserted into vectors for expression of whole antibodies and antibody fragments include nucleotide sequences which encode the corresponding heavy chain or light chain or fragments of any of the modified anti-EGFR antibodies provided herein. For example, the nucleotide sequences encoding any of the variable heavy chain and variable light chain sequences of any antibody or fragment described herein can be inserted into a suitable expression vector described herein or known to one of skill in the art. Any of the amino acid sequences of the modified anti-EGFR antibodies and EGFR-binding fragments provided herein can be reverse translated (also called back translated) to generate nucleic acid sequences, such as DNA sequences that encode the protein, using standard procedures. For example, there are several on-line tools are available to convert protein sequences to encoding DNA sequences, such as bioinformatics.org/sms2/rev_trans.html; biophp.org/minitools/protein_to_dna/demo.php; vivo.colostate.edu/molkit/rtranslate/; ebi.ac.uk/Tools/st/emboss_backtranseq/; molbiol.ru/eng/scripts/01_{—}19.html; and geneinfinity.org/sms/smsbacktranslation.html. Such reverse translated sequences can be inserted into any of the expression vectors provided herein for the expression and production of the provided antibodies or fragments.

[0763] In particular, a sequence of nucleotides encoding a modified anti-EGFR antibody with a 104E amino acid replacement has a sequence of nucleotides encoding a variable heavy chain set forth in SEQ ID NO: 73 and a sequence of nucleotides encoding the variable light chain set forth in SEQ ID NO: 51. Other non-limiting examples of sequences of nucleic acids encoding the variable heavy and light chains, which can be inserted into a suitable expression vector, are set forth in Table 10 and include those encoding a variable heavy chain having a sequence of nucleotides set forth in SEQ ID NOS: 60, 62, 130, 132, 136, 138, 142, 144, 148, 150, 210, 212, 216, 218, 222, 224, 228, 230, 234, 236, 240, 242, 246, 248, and any degenerate sequence thereof and those encoding a variable light chain having a sequence of nucleotides set forth in SEQ ID NOS: 154, 157, 161, 164, 168, 171, 175, 178, 182, 185, 189, 192, 196, 199, 203, 206, 252, 255, 259, 262, 266, 269, 273, 276, 280, 283, 287, 290, 294, 297, 301, 304 and any degenerate sequence thereof

[0764] For purposes herein with respect to expression of anti-EGFR antibodies, such as modified anti-EGFR antibodies, vectors can contain a sequence of nucleotides that encodes a constant region of an antibody operably linked to the nucleic acid sequence encoding the variable region of the antibody. The vector can include the sequence for one or all of a C_{H}1, C_{H}2, hinge, C_{H}3 or C_{H}4 and/or C_{L}. Generally, such as for expression of Fabs, the vector contains the sequence for a C_{H}1 or C_{L} (kappa or lambda light chains). The sequences of constant regions or hinge regions are known to one of skill in the art (see, e.g., U.S. Published Application No. 20080248028). Examples of such sequences are provided herein.

[0765] All or a portion of the constant region of the heavy chain or light chain also can be inserted or contained in the vector for expression of IgG antibodies or fragments thereof. For example, non-limiting examples include those encoding a full-length heavy chain having a sequence of nucleotides set forth in SEQ ID NOS: 58, 71, 128, 134, 140, 146, 208, 214, 220, 226, 232, 238, 244, and any degenerate sequence thereof and those encoding a variable light having a sequence of nucleotides set forth in SEQ ID NOS: 50, 152, 159, 166, 173, 180, 187, 194, 201, 250, 257, 264, 271, 278, 285, 292, 299 or degenerates thereof.

[0766] In addition, V_{H}—C_{H}1 and V_{L}—C_{L} sequences can be inserted into a suitable expression vector for expression of Fab molecules. Nucleic acids encoding variable heavy chain and variable light chain domains of an antibody can be expressed in a suitable expression vector, such as a vector encoding for a linker between the variable heavy chain and variable light chain to produce single chain antibodies. Exemplary linkers include the glycine rich flexible linkers (-G₄S—)ₙ, where n is a positive integer, such as 1 (SEQ ID NO: 346), 2 (SEQ ID NO: 347), 3 (SEQ ID NO: 46), 4 (SEQ ID NO: 348), 5 (SEQ ID NO: 349), or more.

[0767] a. Vectors

[0768] Choice of vector can depend on the desired application. Many expression vectors are available and known to those of skill in the art for the expression of anti-EGFR antibodies or portions thereof, such as antigen binding fragments. The choice of an expression vector is influenced by the choice of host expression system. Such selection is well within the level of skill of the skilled artisan. In general, expression vectors can include transcriptional promoters and optionally enhancers, translational signals, and transcriptional and translational termination signals. Expression vectors that are used for stable transformation typically have a selectable marker which allows for selection and maintenance of the transformed cells. In some cases, an origin of replication can be used to amplify the copy number of the vectors in the cells. Vectors also generally can contain additional nucleotide sequences operably linked to the ligated nucleic acid molecule (e.g., His tag, Flag tag). For applications with antibodies, vectors generally include sequences encoding the constant region. Thus, antibodies or portions thereof also can be expressed as protein fusions. For example, a fusion protein can be generated to add additional functionality to a polypeptide. Examples of fusion proteins include, but are not limited to, fusions of a signal sequence, an epitope tag such as for localization, e.g., a His₆ tag or a myc tag, or a tag for purification, such as a GST tag, and/or a sequence for directing protein secretion and/or membrane association.

[0769] For example, expression of the anti-EGFR antibodies, such as modified anti-EGFR antibodies, can be controlled by any promoter/enhancer known in the art. Suitable bacterial promoters are well-known in the art and described herein below. Other suitable promoters for mammalian cells, yeast cells and insect cells are well-known in the art and some are exemplified below. Selection of the promoter used to direct expression of a heterologous nucleic acid depends on the particular application. Promoters which can be used include but are not limited to eukaryotic expression vectors containing the SV40 early promoter (Bernoist and Chambon, Nature 290:304-310 (1981)), the promoter contained in the 3′ long terminal repeat of Rous sarcoma virus (Yamamoto et al. Cell 22:787-797 (1980)), the herpes thymidine kinase promoter (Wagner et al., Proc. Natl. Acad. Sci. USA 78:1441-1445 (1981)), the regulatory sequences of the metallothionein gene (Brinster et al., Nature 296:39-42 (1982)); prokaryotic expression vectors such as the β-lactamase promoter (Jay et al., (1981) Proc. Natl. Acad. Sci. USA 78:5543) or the tac promoter (DeBoer et al., Proc. Natl. Acad. Sci. USA 80:21-25 (1983)); see also “Useful Proteins from Recombinant Bacteria”: in Scientific American 242:74-94 (1980)); plant expression vectors containing the nopaline synthetase promoter (Herrera-Estrella et al., Nature 303:209-213 (1983)) or the cauliflower mosaic virus 35S RNA promoter (Gardner et al., Nucleic Acids Res. 9:2871 (1981)), and the promoter of the photosynthetic enzyme ribulose bisphosphate carboxylase (Herrera-Estrella et al., Nature 310:115-120 (1984)); promoter elements from yeast and other fungi such as the Ga14 promoter, the alcohol dehydrogenase promoter, the phosphoglycerol kinase promoter, the alkaline phosphatase promoter, and the following animal transcriptional control regions that exhibit tissue specificity and have been used in transgenic animals: elastase I gene control region which is active in pancreatic acinar cells (Swift et al., Cell 38:639-646 (1984); Ornitz et al., Cold Spring Harbor Symp. Quant. Biol. 50:399-409 (1986); MacDonald, Hepatology 7:425-515 (1987)); insulin gene control region which is active in pancreatic beta cells (Hanahan et al., Nature 315:115-122 (1985)), immunoglobulin gene control region which is active in lymphoid cells (Grosschedl et al., Cell 38:647-658 (1984); Adams et al., Nature 318:533-538 (1985); Alexander et al., Mol. Cell Biol. 7:1436-1444 (1987)), mouse mammary tumor virus control region which is active in testicular, breast, lymphoid and mast cells (Leder et al., Cell 45:485-495 (1986)), albumin gene control region which is active in liver (Pinkert et al., Genes and Devel. 1:268-276 (1987)), alpha-fetoprotein gene control region which is active in liver (Krumlauf et al., Mol. Cell. Biol. 5:1639-1648 (1985); Hammer et al., Science 235:53-58 1987)), alpha-1 antitrypsin gene control region which is active in liver (Kelsey et al., Genes and Devel. 1:161-171 (1987)), beta globin gene control region which is active in myeloid cells (Magram et al., Nature 315:338-340 (1985); Kollias et al., Cell 46:89-94 (1986)), myelin basic protein gene control region which is active in oligodendrocyte cells of the brain (Readhead et al., Cell 48:703-712 (1987)), myosin light chain-2 gene control region which is active in skeletal muscle (Shani, Nature 314:283-286 (1985)), and gonadotrophic releasing hormone gene control region which is active in gonadotrophs of the hypothalamus (Mason et al., Science 234:1372-1378 (1986)).

[0770] In addition to the promoter, the expression vector typically contains a transcription unit or expression cassette that contains all the additional elements required for the expression of the antibody, or portion thereof, in host cells. A typical expression cassette contains a promoter operably linked to the nucleic acid sequence encoding the protein and signals required for efficient polyadenylation of the transcript, ribosome binding sites and translation termination. Additional elements of the cassette can include enhancers. In addition, the cassette typically contains a transcription termination region downstream of the structural gene to provide for efficient termination. The termination region can be obtained from the same gene as the promoter sequence or can be obtained from different genes.

[0771] Some expression systems have markers that provide gene amplification such as thymidine kinase and dihydrofolate reductase. Alternatively, high yield expression systems not involving gene amplification are also suitable, such as using a baculovirus vector in insect cells, with a nucleic acid sequence encoding a protein under the direction of the polyhedron promoter or other strong baculovirus promoter.

[0772] Exemplary expression vectors include any mammalian expression vector such as, for example, pCMV and pCDNA3.1. Other eukaryotic vectors, for example any containing regulatory elements from eukaryotic viruses can be used as eukaryotic expression vectors. These include, for example, SV40 vectors, papilloma virus vectors, and vectors derived from Epstein-Bar virus. Exemplary eukaryotic vectors include pMSG, pAV009/A+, pMT010/A+, pMAMneo-5, baculovirus pDSCE, and any other vector allowing expression of proteins under the direction of the CMV promoter, SV40 early promoter, SV40 late promoter, metallothionein promoter, murine mammary tumor virus promoter, Rous sarcoma virus promoter, polyhedron promoter, or other promoters shown effective for expression in eukaryotes. For bacterial expression, such vectors include pBR322, pUC, pSKF, pET23D, and fusion vectors such as MBP, GST and LacZ.

[0773] Any methods known to those of skill in the art for the insertion of DNA fragments into a vector can be used to construct expression vectors containing a nucleic acid encoding a protein or an antibody chain. These methods can include in vitro recombinant DNA and synthetic techniques and in vivo recombinants (genetic recombination). The insertion into a cloning vector can, for example, be accomplished by ligating the DNA fragment into a cloning vector which has complementary cohesive termini. If the complementary restriction sites used to fragment the DNA are not present in the cloning vector, the ends of the DNA molecules can be enzymatically modified. Alternatively, any site desired can be produced by ligating nucleotide sequences (linkers) onto the DNA termini; these ligated linkers can contain specific chemically synthesized nucleic acids encoding restriction endonuclease recognition sequences.

[0774] In one example, nucleic acid encoding the heavy chain of an antibody, is ligated into a first expression vector and nucleic acid encoding the light chain of an antibody is ligated into a second expression vector. The expression vectors can be the same or different, although generally they are sufficiently compatible to allow comparable protein expression of the heavy and light chains. The first and second expression vectors are generally co-transfected into host cells, typically at a 1:1 ratio. Exemplary vectors include, but are not limited to, pγ1HC and pκLC (Tiller et al. (2008) J Immunol. Methods, 329:112-24). Other expression vectors include the light chain expression vector pAG4622 and the heavy chain expression vector pAH4604 (Coloma et al. (1992) J Immunol. Methods, 152:89-104). The pAG4622 vector contains the genomic sequence encoding the C-region domain of the human κ L chain and the gpt selectable marker. The pAH4604 vector contains the hisD selectable marker and sequences encoding the human H chain γ1 C-region domain. In another example, the heavy and light chain can be cloned into a single vector that has expression cassettes for both the heavy and light chain.

[0775] In some examples, the vector is a bicistronic vector that contains an internal ribosomal entry site (IRES) between the open reading frames encoding the heavy and light chains. For example, an exemplary vector includes the vector designated pcDNA3-Erbitux-LC-IRES-HC-WT (e.g., SEQ ID NO: 306), where nucleic acid encoding the heavy chain (HC) or light chain (LC) of any of the modified anti-EGFR antibodies provided herein can be substituted in place of the sequences therein. Examples of such vectors are set forth in any of SEQ ID NOS: 307-314.

[0776] b. Cells and Expression Systems

[0777] Generally, any cell type that can be engineered to express heterologous DNA and has a secretory pathway is suitable for expression of the modified anti-EGFR antibodies provided herein. Expression hosts include prokaryotic and eukaryotic organisms such as bacterial cells (e.g., E. coli), yeast cells, fungal cells, Archaea, plant cells, insect cells and animal cells including human cells. Expression hosts can differ in their protein production levels as well as the types of post-translational modifications that are present on the expressed proteins. Further, the choice of expression host is often related to the choice of vector and transcription and translation elements used. For example, the choice of expression host is often, but not always, dependent on the choice of precursor sequence utilized. For example, many heterologous signal sequences can only be expressed in a host cell of the same species (i.e., an insect cell signal sequence is optimally expressed in an insect cell). In contrast, other signal sequences can be used in heterologous hosts such as, for example, the human serum albumin (hHSA) signal sequence which works well in yeast, insect, or mammalian host cells and the tissue plasminogen activator pre/pro sequence which has been demonstrated to be functional in insect and mammalian cells (Tan et al., (2002) Protein Eng. 15:337). The choice of expression host can be made based on these and other factors, such as regulatory and safety considerations, production costs and the need and methods for purification. Thus, the vector system must be compatible with the host cell used.

[0778] Expression in eukaryotic hosts can include expression in yeasts such as Saccharomyces cerevisiae and Pichia pastoris, insect cells such as Drosophila cells and lepidopteran cells, plants and plant cells such as tobacco, corn, rice, algae, and Lemna. Eukaryotic cells for expression also include mammalian cells lines such as Chinese hamster ovary (CHO) cells or baby hamster kidney (BHK) cells. Eukaryotic expression hosts also include production in transgenic animals, for example, including production in serum, milk and eggs.

[0779] Recombinant molecules can be introduced into host cells via, for example, transformation, transfection, infection, electroporation and sonoporation, so that many copies of the gene sequence are generated. Generally, standard transfection methods are used to produce bacterial, mammalian, yeast, or insect cell lines that express large quantity of antibody chains, which are then purified using standard techniques (see e.g., Colley et al. (1989) J. Biol. Chem., 264:17619-17622; Guide to Protein Purification, in Methods in Enzymology, vol. 182 (Deutscher, ed.), 1990). Transformation of eukaryotic and prokaryotic cells is performed according to standard techniques (see, e.g., Morrison (1977) J. Bact. 132:349-351; Clark-Curtiss and Curtiss (1983) Methods in Enzymology, 101, 347-362). For example, any of the well-known procedures for introducing foreign nucleotide sequences into host cells can be used. These include the use of calcium phosphate transfection, polybrene, protoplast fusion, electroporation, biolistics, liposomes, microinjection, plasma vectors, viral vectors and any other the other well-known methods for introducing cloned genomic DNA, cDNA, synthetic DNA or other foreign genetic material into a host cell. Generally, for purposes of expressing an antibody, host cells are transfected with a first vector encoding at least a V_{H} chain and a second vector encoding at least a V_{L} chain. Thus, it is only necessary that the particular genetic engineering procedure used be capable of successfully introducing at least both genes into the host cell capable of expressing antibody polypeptide, or modified form thereof.

[0780] The modified anti-EGFR antibodies, provided herein, can be produced by any method known in the art for protein production including in vitro and in vivo methods such as, for example, the introduction of nucleic acid molecules encoding antibodies into a host cell or host animal and expression from nucleic acid molecules encoding recombined antibodies in vitro. Prokaryotes, especially E. coli, provide a system for producing large amounts of reassembled antibodies or portions thereof, and are particularly desired in applications of expression and purification of proteins. Transformation of E. coli is a simple and rapid technique well-known to those of skill in the art. E. coli host strains for high throughput expression include, but are not limited to, BL21 (EMD Biosciences) and LMG194 (ATCC). A particular example of such an E. coli host strain is BL21. Vectors for high throughput expression include, but are not limited to, pBR322 and pUC vectors.

### i. Prokaryotic Expression

[0781] Prokaryotes, especially E. coli, provide a system for producing large amounts of modified anti-EGFR antibodies, or portions thereof. Transformation of E. coli is a simple and rapid technique well-known to those of skill in the art. Expression vectors for E. coli can contain inducible promoters that are useful for inducing high levels of protein expression and for expressing antibodies that exhibit some toxicity to the host cells. Examples of inducible promoters include the lac promoter, the trp promoter, the hybrid tac promoter, the T7 and SP6 RNA promoters and the temperature regulated λP_{L} promoter.

[0782] Antibodies or portions thereof can be expressed in the cytoplasmic environment of E. coli. The cytoplasm is a reducing environment and for some antibodies, this can result in the formation of insoluble inclusion bodies. Reducing agents such as dithiothreitol and β-mercaptoethanol and denaturants (e.g., such as guanidine-HCl and urea) can be used to resolubilize the antibodies. An exemplary alternative approach is the expression of recombined antibodies or fragments thereof in the periplasmic space of bacteria which provides an oxidizing environment and chaperonin-like and disulfide isomerases leading to the production of soluble protein. Typically, a leader sequence is fused to the protein to be expressed which directs the protein to the periplasm. The leader is then removed by signal peptidases inside the periplasm. Exemplary pathways to translocate expressed proteins into the periplasm are the Sec pathway, the SRP pathway and the TAT pathway. Examples of periplasmic-targeting leader sequences include the pelB leader from the pectate lyase gene, the StII leader sequence, and the DsbA leader sequence. In some cases, periplasmic expression allows leakage of the expressed protein into the culture medium. The secretion of antibodies allows quick and simple purification from the culture supernatant. Antibodies that are not secreted can be obtained from the periplasm by osmotic lysis. Similar to cytoplasmic expression, in some cases proteins can become insoluble and denaturants and reducing agents can be used to facilitate solubilization and refolding using standard procedures. Temperature of induction and growth also can influence expression levels and solubility. Typically, temperatures between 25° C. and 37° C. are used. Mutations also can be used to increase solubility of expressed proteins. Typically, bacteria produce aglycosylated proteins. Thus, glycosylation can be added in vitro after purification from host cells.

### ii. Yeast

[0783] Yeasts such as Saccharomyces cerevisiae, Schizosaccharomyces pombe, Yarrowia lipolytica, Kluyveromyces lactis, and Pichia pastoris are useful expression hosts for recombined antibodies or portions thereof. Yeast can be transformed with episomal replicating vectors or by stable chromosomal integration by homologous recombination. Typically, inducible promoters are used to regulate gene expression. Examples of such promoters include AOX1, GAL1, GAL7, and GAL5 and metallothionein promoters such as CUP1. Expression vectors often include a selectable marker such as LEU2, TRP1, HIS3, and URA3 for selection and maintenance of the transformed DNA. Proteins expressed in yeast are often soluble. Co-expression with chaperonins such as BiP and protein disulfide isomerase can improve expression levels and solubility. Additionally, proteins expressed in yeast can be directed for secretion using secretion signal peptide fusions such as the yeast mating type alpha-factor secretion signal from Saccharomyces cerevisae and fusions with yeast cell surface proteins such as the Aga2p mating adhesion receptor or the Arxula adeninivorans glucoamylase. A protease cleavage site such as for the Kex-2 protease, can be engineered to remove the fused sequences from the expressed polypeptides as they exit the secretion pathway. Yeast also is capable of glycosylation at Asn-X-Ser/Thr motifs.

### iii. Insects

[0784] Insect cells, particularly using baculovirus expression, are useful for expressing modified anti-EGFR antibodies or portions thereof. Insect cells express high levels of protein and are capable of most of the post-translational modifications used by higher eukaryotes. Baculovirus have a restrictive host range which can improve the safety and reduce regulatory concerns of eukaryotic expression. Typical expression vectors use a promoter for high level expression such as the polyhedrin promoter and p10 promoter of baculovirus. Commonly used baculovirus systems include the baculoviruses such as Autographa californica nuclear polyhedrosis virus (AcNPV), and the Bombyx mori nuclear polyhedrosis virus (BmNPV) and an insect cell line such as Sf9 derived from Spodoptera frugiperda and TN derived from Trichoplusia ni. For high-level expression, the nucleotide sequence of the molecule to be expressed can be fused immediately downstream of the polyhedrin initiation codon of the virus. To generate baculovirus recombinants capable of expressing human antibodies, a dual-expression transfer, such as pAcUW51 (PharMingen) is utilized. Mammalian secretion signals are accurately processed in insect cells and can be used to secrete the expressed protein into the culture medium.

[0785] An alternative expression system in insect cell for expression of the modified anti-EGFR antibodies provided herein is the use of stably transformed cells. Cell lines such as Sf9 derived cells from Spodoptera frugiperda and TN derived cells from Trichoplusia ni can be used for expression. The baculovirus immediate early gene promoter IE1 can be used to induce consistent levels of expression. Typical expression vectors include the pIE1-3 and pI31-4 transfer vectors (Novagen). Expression vectors are typically maintained by the use of selectable markers such as neomycin and hygromycin.

### iv. Mammalian Cells

[0786] Mammalian expression systems can be used to express anti-EGFR antibodies, such as modified anti-EGFR antibodies, including antigen-binding fragments thereof. Expression constructs can be transferred to mammalian cells by viral infection such as adenovirus or by direct DNA transfer such as by using liposomes, calcium phosphate, DEAE-dextran and by physical means such as electroporation and microinjection. Expression vectors for mammalian cells typically include an mRNA cap site, a TATA box, a translational initiation sequence (Kozak consensus sequence) and polyadenylation elements. Such vectors often include transcriptional promoter-enhancers for high-level expression, for example the SV40 promoter-enhancer, the human cytomegalovirus (CMV) promoter and the long terminal repeat of Rous sarcoma virus (RSV). These promoter-enhancers are active in many cell types. Tissue and cell-type promoters and enhancer regions also can be used for expression. Exemplary promoter/enhancer regions include, but are not limited to, those from genes such as elastase I, insulin, immunoglobulin, mouse mammary tumor virus, albumin, alpha fetoprotein, alpha 1 antitrypsin, beta globin, myelin basic protein, myosin light chain 2, and gonadotropic releasing hormone gene control.

[0787] Selectable markers can be used to select for and maintain cells with the expression construct. Examples of selectable marker genes include, but are not limited to, hygromycin B phosphotransferase, adenosine deaminase, xanthine-guanine phosphoribosyl transferase, aminoglycoside phosphotransferase, dihydrofolate reductase and thymidine kinase. Modified anti-EGFR antibodies can be produced, for example, using a NEO^{R}/G418 system, a dihydrofolate reductase (DHFR) system or a glutamine synthetase (GS) system. The GS system uses joint expression vectors, such as pEE12/pEE6, to express both heavy chain and light chain. Fusion with cell surface signaling molecules such as TCR-ζ and FI_{ε}RI-γ can direct expression of the proteins in an active state on the cell surface.

[0788] Many cell lines are available for mammalian expression including mouse, rat, human, monkey, chicken and hamster cells. Exemplary cell lines include any known in the art or described herein, such as, for example, CHO, Balb/3T3, HeLa, MT2, mouse NSO (nonsecreting) and other myeloma cell lines, hybridoma and heterohybridoma cell lines, lymphocytes, fibroblasts, Sp2/0, COS, NIH3T3, HEK293, 293S, 2B8, and HKB cells. Cell lines adapted to serum-free media which facilitates purification of secreted proteins from the cell culture media also are available. One such example is the serum free EBNA-1 cell line (Pham et al., (2003) Biotechnol. Bioeng. 84:332-42.)

### v. Plants

[0789] Transgenic plant cells and plants can be used to express anti-EGFR antibodies, such as modified anti-EGFR antibodies, or a portion thereof described herein. Expression constructs are typically transferred to plants using direct DNA transfer such as microprojectile bombardment and PEG-mediated transfer into protoplasts, and with agrobacterium-mediated transformation. Expression vectors can include promoter and enhancer sequences, transcriptional termination elements and translational control elements. Expression vectors and transformation techniques are usually divided between dicot hosts, such as Arabidopsis and tobacco, and monocot hosts, such as corn and rice. Examples of plant promoters used for expression include the cauliflower mosaic virus CaMV 35S promoter, the nopaline synthase promoter, the ribose bisphosphate carboxylase promoter and the maize ubiquitin-1 (ubi-1) promoter promoters. Selectable markers such as hygromycin, phosphomannose isomerase and neomycin phosphotransferase are often used to facilitate selection and maintenance of transformed cells. Transformed plant cells can be maintained in culture as cells, aggregates (callus tissue) or regenerated into whole plants. Transgenic plant cells also can include algae engineered to produce proteases or modified proteases (see for example, Mayfield et al. (2003) PNAS 100:438-442). Because plants have different glycosylation patterns than mammalian cells, this can influence the choice of protein produced in these hosts.

[0790] 2. Purification

[0791] Anti-EGFR antibodies, such as modified anti-EGFR antibodies and antigen binding portions thereof, can be purified by any procedure known to one of skill in the art or described herein. Proteins can be purified to substantial purity using standard protein purification techniques known in the art including but not limited to, SDS-PAGE, size fraction and size exclusion chromatography, ammonium sulfate precipitation, chelate chromatography, ionic exchange chromatography or column chromatography. For example, antibodies can be purified by column chromatography. An exemplary method for purifying the anti-EGFR antibodies provided herein is column chromatography, wherein a solid support column material is linked to Protein G, a cell surface-associated protein from Streptococcus, that binds immunoglobulins with high affinity. In some examples, the anti-EGFR antibodies can be purified by column chromatography, wherein a solid support column material is linked to Protein A, a cell surface-associated protein from Staphylococcus that binds immunoglobulins, such as IgG antibodies, with high affinity (see, e.g., Liu et al. (2010) MAbs 2(5):480-499). Other immunoglobulin-binding bacterial proteins that can be used to purify the anti-EGFR antibodies provided herein include Protein A/G, a recombinant fusion protein that combines the IgG binding domains of Protein A and Protein G; and Protein L, a surface protein from Peptostreptococcus (Bjorck (1988) J. Immunol., 140(4):1194-1197; Kastern, et al. (1992) J. Biol. Chem. 267(18):12820-12825; Eliasson et al. (1988) J. Biol. Chem. 263:4323-4327).

[0792] The anti-EGFR antibodies can be purified to 60%, 70%, 80% purity and typically at least 90%, 91%, 92%, 93%, 94%, 95%, 96%, 97%, 98% or 99% purity. Purity can be assessed by standard methods such as by SDS-PAGE and coomassie staining.

[0793] Methods for purification of anti-EGFR antibodies, including antibodies or portions thereof from host cells, depend on the chosen host cells and expression systems. For secreted molecules, proteins are generally purified from the culture media after removing the cells. For intracellular expression, cells can be lysed and the proteins purified from the extract. When transgenic organisms such as transgenic plants and animals are used for expression, tissues or organs can be used as starting material to make a lysed cell extract. Additionally, transgenic animal production can include the production of polypeptides in milk or eggs, which can be collected, and if necessary further the proteins can be extracted and further purified using standard methods in the art.

[0794] When proteins are expressed by transformed bacteria in large amounts, typically after promoter induction, although expression can be constitutive, the polypeptides can form insoluble aggregates. There are several protocols that are suitable for purification of polypeptide inclusion bodies known to one of skill in the art. Numerous variations will be apparent to those of skill in the art.

### E. METHODS FOR ASSESSING ANTI-EGFR ANTIBODY PROPERTIES AND ACTIVITIES

[0795] The modified anti-EGFR antibodies, and variants and fragments thereof, provided herein, can be assessed for binding to EGFR antigen (e.g., human EGFR) or soluble fragment thereof. The binding activity can be assessed under conditions that compare the activity of an antibody under conditions of low pH/increased lactate concentrations and neutral pH/physiological lactate concentrations. For example, binding activity can be assessed under conditions of acidic pH (e.g., pH 5.8 to 6.5, such as pH 6.0 to 6.5) and/or increased lactate concentrations (e.g., 10 to 20 mM, such as 15 to 20 mM) and compared to binding activity under conditions of neutral pH (e.g., pH 7.0 to 7.6, such as pH 7.0 to 7.4) and/or physiological lactate concentrations (e.g., 0.5 to 5 mM, such as about 1 mM). Such assays can confirm that the binding activity is greater under conditions that include one or both of acid pH 6.0 to 6.5, inclusive, and/or lactate concentration of 15 mM to 20 mM, inclusive, compared to under conditions that include one or both of neutral pH of or about 7.4 and/or lactate concentration of or about 1 mM.

[0796] The assays also can be performed in the presence of physiological concentrations of protein or serum (e.g., 10 mg/mL to 50 mg/mL protein, such as serum albumin; or 20-50% serum, such as human serum). For example, the anti-EGFR antibodies typically are assessed for activity under a first set of conditions that includes 20-50% serum (vol/vol) or 10-50 mg/mL protein (e.g., serum albumin), and an acidic pH of about between 5.8 to 6.8 and/or elevated lactate levels of 10 mM to 20 mM. For example, the first set of conditions can include at least 25% serum (vol/vol) or 12-40 mg/mL protein (e.g., serum albumin), and an acidic pH of about between 6.0 to 6.5, such as pH 6.0 and/or elevated lactate levels of 15 mM to 20 mM, such as about 16.7 mM. The anti-EGFR antibody also is assessed for activity under a second set of conditions that includes 20-50% serum (vol/vol) or 10-50 mg/mL protein (e.g., serum albumin), and near neutral pH or neutral pH of about between 7.0 to 7.4 and/or a lactate concentration of 0.5 to 5 mM. For example, the second set of conditions includes at least 25% serum (vol/vol) or 12-40 mg/mL protein (e.g., serum albumin), and pH about between 7.2 to 7.4, such as about pH 7.4. and/or lactate concentration of 0.5 mM to 2 mM, such as 1 mM. In some examples, the anti-EGFR antibody also can be assessed for activity under a third set of conditions that can include at least 25% serum (vol/vol) or 12-40 mg/mL protein (e.g., serum albumin), and an acidic pH of about between 6.0 to 6.5, such as pH 6.5 and/or elevated lactate levels of 15 mM to 20 mM, such as about 16.7 mM. In such assays, the amount of added protein to simulate a physiologic environment (e.g., serum protein) is typically the same or substantially the same for all sets of conditions tested, but can vary by ±25% or less from one condition to the other.

[0797] Hence, binding activity can be determined in conditions that simulate a physiologic environment or that is a physiologic environment. The binding can be assessed in vitro (e.g., in an immunoassay) or ex vivo or in vivo (e.g., binding to tumor cells or non-tumor cells, such as cells of the skin dermis). The assays provided herein include any assays that can test or assess an activity of a modified anti-EGFR antibody in a detectable or otherwise measurable manner under different pH and/or lactate concentrations, and, optionally, in the presence of physiological concentrations of total protein. The assays provided herein can be developed in a high throughput format in order to assess an activity of numerous anti-EGFR antibodies, for example protein variants, at one time in dual format. For example, in vitro binding assays can be performed using solid-support binding assays or solution binding assays, where the binding is performed under the above conditions. In other examples, binding assays can be performed in vivo where binding is compared on cells present in a tumor versus cells present in non-tumor cells. In particular, an in vivo binding assay can be performed to assess binding or localization of administered antibody to tumor cells versus basal skin keratinocytes. This is exemplified herein using xenograft or skin graft models. Other models also can be employed. Descriptions of exemplary assays are provided below.

[0798] In addition to binding activity, other assays to assess the activity of modified anti-EGFR antibodies provided herein can be performed and include in vitro or in vivo assays including, but not limited to, functional assays, in vivo assays, animal models and clinical assays to measure the activity and/or side effects of the modified anti-EGFR antibodies provided herein. The activity assessed can be any activity of an anti-EGFR antibody, such as binding to EGFR, cell growth inhibition (CGI) activity or tumor growth inhibition activity. Any of the antibodies provided herein also can be characterized in a variety of assays known to one of skill in the art to assess clinical properties such as, for example, therapeutic efficacy, affinity for EGFR, toxicity, side effects, pharmacokinetics and pharmacodynamics.

[0799] 1. Binding Assays

[0800] Modified anti-EGFR antibodies can be assayed for the ability to bind to EGFR by any method known to one of skill in the art. Exemplary assays are described herein below.

[0801] Binding assays can be performed in solution, suspension or on a solid support. For example, EGFR or soluble fragment thereof can be immobilized to a solid support (e.g., a carbon or plastic surface, a tissue culture dish or chip) and contacted with antibody. Unbound antibody or target protein can be washed away and bound complexes can then be detected. Binding assays can be performed under conditions to reduce nonspecific binding, such as by using buffers with a high ionic strength (e.g., 0.3-0.4 M NaCl) and/or with nonionic detergent (e.g., 0.1% Triton X-100 or Tween 20) and/or blocking proteins (e.g., bovine serum albumin or gelatin). Negative controls also can be included in such assays as a measure of background binding. Binding affinities can be determined using quantitative ELISA, Scatchard analysis (Munson et al., (1980) Anal. Biochem., 107:220), surface plasmon resonance, isothermal calorimetry, or other methods known to one of skill in the art (e.g., Liliom et al. (1991) J. Immunol Methods. 143(1):119-25).

[0802] Such assays can be performed, for example, in solution (e.g., Houghten (1992) Bio/Techniques 13:412-421), on beads (Lam (1991) Nature 354:82-84), on chips (Fodor (1993) Nature 364:555-556), on bacteria (U.S. Pat. No. 5,223,409), on spores (U.S. Pat. Nos. 5,571,698; 5,403,484; and 5,223,409), on plasmids (Cull et al. (1992) Proc. Natl. Acad. Sci. USA 89:1865-1869) or on phage (Scott and Smith (1990) Science 249:386-390; Devlin (1990) Science 249:404-406; Cwirla et al. (1990) Proc. Natl. Acad. Sci. USA 87:6378-6382; and Felici (1991) J Mol. Biol. 222:301-310).

[0803] Typically, EGFR binding is detected using a method that is capable of being quantified such that the level of activity can be assessed. For example, methods of quantitation include, but are not limited to, spectrophotometric, fluorescent and radioactive methods. Such methods measure, for example, colorimetric signals, chemiluminescent signals, chemifluorescent signals or radioactive signals.

[0804] In some examples, the modified anti-EGFR antibodies provided herein can be labeled with a detectable moiety or tag to facilitate detection and determination of EGFR biding activity. The skilled artisan can select an appropriate detectable moiety or tag for use in the assays described or known in the art. Any detectable moiety (i.e., tag or other moiety known to one of skill in the art) that is capable of being detected or identified can be linked to the modified anti-EGFR antibody or fragment to be tested, directly or indirectly, for example using a linker. Linkage can be at the N- or C-terminus of the therapeutic antibody. Exemplary tags and moieties are set forth in Table 13.

TABLE 13
Exemplary tags and moieties

| | | | | SEQ |
|---|---|---|---|---|
| | | # of | Size | ID |
| Name | Sequence | Residues | (Da) | NO |
| c-Myc | EQKLISEEDL | 10 | 1200 | 335 |
| FLAG | DYKDDDDK | 8 | 1012 | 45 |
| His | HHHHHH | 6 | | 44 |
| HA | YPYDVPDYA | 9 | 1102 | 336 |
| VSV-G | YTDIEMNRLGK | 11 | 1339 | 337 |
| HSV | QPELAPEDPED | 11 | 1239 | 338 |
| V5 | GKPIPNPLLGLDST | 14 | 1421 | 339 |
| Poly Arg | RRRRR | 5-6 | 800 | 340 |
| Strep-tag-II | WSHPQFEK | 8 | 1200 | 341 |
| S | KETAAAKFERQHMDS | 15 | 1750 | 342 |
| 3x FLAG | DYKDHDGDYKDHDIDYKDDD | 22 | 2730 | 343 |
| | DK | | | |
| HAT | KDHLIHNVHKEFHAHAHNK | 19 | 2310 | 344 |
| SBP | MDEKTTGWRGGHVVEGLAGEL | 38 | 4306 | 345 |
| | EQLRARLEHHPQGQREP | | | |

[0805] Any linker known to one of skill in the art that is capable of linking the detectable moiety to the therapeutic antibodies described herein can be used. Exemplary linkers include the glycine rich flexible linkers (-G₄S—)ₙ, where n is a positive integer, such as 1 (SEQ ID NO: 346), 2 (SEQ ID NO: 347), 3 (SEQ ID NO: 46), 4 (SEQ ID NO: 348), 5 (SEQ ID NO: 349), or more.

[0806] Binding assays can be performed in solution, by affixing the modified anti-EGFR antibody to a solid support, or by affixing EGFR to a solid support. Any solid support binding assay known to the skilled artisan is contemplated for testing the activities of the antibodies provided herein, including, but not limited to, surface plasmon resonance, bio-layer interferometry, immunoassays, binding to tissues using immunofluorescence or immunohistochemistry, solution binding assays, and cell based binding assays (e.g., using any of the EGFR-expressing cells described below).

[0807] Immunoassays include competitive and non-competitive assay systems using techniques such as, but not limited to, western blots or immunoblots, such as quantitative western blots; radioimmunoassays; ELISA (enzyme linked immunosorbent assay); Meso

[0808] Scale Discovery (MSD, Gaithersburg, Md.); “sandwich” immunoassays; immunoprecipitation assays; ELISPOT; precipitin reactions; gel diffusion precipitin reactions; immunodiffusion assays; agglutination assays; complement-fixation assays; immunoradiometric assays; fluorescent immunoassays; protein A immunoassays; immunohistochemistry; immuno-electron microscopy or liposome immunoassays (LIA). Such assays are routine and well-known in the art (see, e.g., Ausubel et al., Eds, 1994, Current Protocols in Molecular Biology, Vol. 1, John Wiley & Sons, Inc., New York).

[0809] In some examples, immunohistochemistry and/or immunofluorescence can be used to assess EGFR binding, ex vivo, in animal models. For example, antibody binding to xenograft tumors in a rodent or other animal model can be analyzed. In other examples, immunohistochemistry can be used to assess modified anti-EGFR antibody binding to skin, such as primate skin. In other examples, immunohistochemistry can be used to assess binding to xenograft tumors and primate skin grafts, ex vivo, for example to visually or quantitatively compare binding preferences of the antibody and to determine if the tested antibody exhibits selective or conditional binding in vivo (see, e.g., Examples 11-13).

[0810] In other examples, an animal model containing a xenograft tumor or skin graft, such as an animal model described herein, can be administered a modified anti-EGFR antibody provided herein, such as by systemic administration., to assess in vivo binding of the modified anti-EGFR antibody. In such examples, the tissue can be harvested at particular time(s) to assess binding ex vivo by immunohistochemistry or immunofluorescence as described above. In other examples, the administered modified anti-EGFR antibody is conjugated to a fluorophore, such as an infrared fluorophore (e.g., DyLight⁷⁵⁵), which is capable of transmitting fluorescence through the skin. In such examples, anti-EGFR antibody binding can be visualized in vivo using a fluorescent imaging system such as the IVIS Caliper imaging system, and antibody binding to xenograft tumors and/or primate skin grafts can be assessed (see, e.g., Example 13). Tissue can subsequently be harvested for ex vivo confirmational immunohistochemical analysis.

[0811] Solution binding assays, including any solution binding assay known to the skilled artisan, can be used to assess binding activity including equilibrium dialysis, competitive binding assays (e.g., Myers et al., (1975) Proc. Natl. Acad. Sci. USA), radiolabeled binding assays (e.g., Feau et al., (2009) J. Biomol. Screen. 14(1):43-48), calorimetry, including isothermal titration calorimetry (ITC) and differential scanning calorimetry (e.g., Alvarenga et al. (2012) Anal. Biochem 421(1):138-151, Perozzo et al., (2004) J. Recept Signal. Transduct Res. 24(1-2):1-52; Holdgate (2001) Biotechniques 31(1):164-166, 168, 170, Celej et al. (2006) Anal. Biochem. 350(2):277-284), and spectroscopic fluorescence assays, including fluorescence resonance energy transfer (FRET) assays (Wu et al. (2007), J. Pharm. Biomed. Anal. 44(3):796-801). The conditions for binding assays in can be adapted from conditions discussed above for binding assays performed on a solid support.

[0812] Depending on the quantitative assay selected to measure antibody binding, absolute binding can be represented, for example, in terms of optical density (OD), such as from densitometry or spectrophotometry measurements; arbitrary fluorescent units (AFU), such as from fluorescence measurements; or lumens, such as from chemiluminescence measurements. In some examples, the specific activity is calculated by dividing the absolute binding signal by the antibody protein concentration. In some examples, the specific activity is normalized to give a normalized specific activity (NSA) for each modified anti-EGFR antibody by dividing the specific activity of the modified anti-EGFR antibody by the specific activity of a reference antibody, such as an unmodified anti-EGFR parental antibody, such as wild-type Cetuximab.

[0813] Binding activity also can be measured in terms of binding affinity, which can be determined in terms of binding kinetics, such as measuring rates of association (kₐ or kₒₙ) and/or dissociation (k_{d} or k_{off}), half maximal effective concentration (EC₅₀) values, and/or thermodynamic data (e.g., Gibbs free energy (ΔG), enthalpy (ΔH), entropy (−TΔS), and/or calculating association (K_{A}) or dissociation (K_{D}) constants. Typically, determination of binding kinetics requires known antibody and EGFR protein concentrations. Rates of association (kₐ) and association constants (K_{A}) are positively correlated with binding affinity. In contrast, rates of dissociation (k_{d}), dissociation constants (K_{D}) and EC₅₀ values are negatively correlated with binding affinity. Thus, higher binding affinity is represented by lower k_{d}, K_{D} and EC₅₀ values.

[0814] Comparing the binding activities of the modified antibodies provided herein under conditions of low pH and/or elevated lactate levels and conditions of neutral pH and/or normal lactate levels can be accomplished by comparing absolute binding under identical conditions (e.g., identical protein dilutions and binding conditions, other than the different pH and/or lactate conditions) or by comparing binding affinity under the different conditions.

[0815] Thus, using such assays, the ratio of binding activity under conditions that include one or both of pH 6.0 to 6.5, inclusive, and/or lactate concentration of between 10 mM to 20 mM, inclusive, compared to under conditions of one or both of neutral pH of or about 7.4 and/or lactate concentration of or about 1 mM can be determined Depending on the assay employed, the binding activity can be a ratio of a quantified value that is an absolute value (e.g., optical density), a concentration measurement of binding or potency (e.g., EC50) or a kinetic measurement (e.g., association or dissociation constant). For purposes herein, in all instances, the ratio is determined in a manner such that a ratio of greater than 1 indicates binding is greater (e.g., tighter binding affinity or lower EC₅₀) under conditions that include one or both of pH 6.0 to 6.5, inclusive, and/or lactate concentration of between 10 mM to 20 mM, inclusive, compared to under conditions of one or both of neutral pH of or about 7.4 and/or lactate concentration of or about 1 mM.

[0816] For example, in examples where absolute binding is measured, conditional binding can be determined by calculating the ratio of absolute binding under acidic pH (e.g., pH 6.0 or 6.5) and/or elevated lactate (e.g., 16.7 mM) conditions versus the absolute binding under neutral pH (e.g., pH 7.4) and/or normal lactate (e.g., 1 mM) conditions, for example, by determining the quotient of OD_{pH 6.0}/OD_{pH 7.4} or OD_{pH 6.5}/OD_{pH 7.4}. When binding activity is determined in terms of kinetic measures that are positively correlated with binding affinity (e.g., kₐ and K_{A}), the ratio of activity can be evaluated by calculating the ratios of positively correlating terms under acidic pH (e.g., pH 6.0 or 6.5) and/or elevated lactate (e.g., 16.7 mM) conditions versus the absolute binding under neutral pH (e.g., pH 7.4) and/or normal lactate (e.g., 1 mM) conditions, for example, by determining the quotient of K_{A(pH 6.0)}/K_{A(pH 7.4)} or K_{A(pH 6.5)}/K_{A(pH 7.4)}. When binding activity is determined in terms of binding measures that are negatively or inversely correlated with binding affinity (e.g., K_{D} or EC₅₀), ratio of binding activity can be evaluated by calculating the ratios of the inverse, or reciprocal, of the negatively correlating terms under acidic pH (e.g., pH 6.0 or 6.5) and/or elevated lactate (e.g., 16.7 mM) conditions versus the absolute binding under neutral pH (e.g., pH 7.4) and/or normal lactate (e.g., 1 mM) conditions, for example, by determining the quotient of (1/EC_{50 (pH 6.0)}(1/EC_{50 (pH 7.4)}.

[0817] Typically, antibodies provided herein have a ratio of binding activity that is at least 2, 3, 4, 5, 6, 7, 8, 9, 10, 15, 20, 25, 30, 35, 40 or 50, indicating at least a 2-fold, 3-fold, 4-fold, 5-fold, 6-fold, 7-fold, 8-fold, 10-fold, 15-fold, 20-fold, 25-fold, 30-fold, 35-fold, 40-fold, 50-fold or more greater binding (e.g., tighter binding affinity or lower EC₅₀).

### 2. Other Cell Based Functional Assays

[0818] Assays to measure activity of the anti-EGFR antibody, such as a modified anti-EGFR antibodies, provided herein include cell based assays. Cell lines that can be used include any cell lines described in the art or cell lines that can be obtained from repositories such as the American Type Culture Collection (ATCC). The skilled artisan can select cell lines with desired properties. Generally, assays are performed using cell lines known to express EGFR. Such cells are known to one of skill in the art. For example, one can consult the ATCC Catalog (atcc.org) to identify cell lines.

[0819] Exemplary cell lines that express EGFR that can be used in cell based assays to screen the anti-EGFR antibodies provided herein include DiFi human colorectal carcinoma cells, A431 cells (ATCC CRL-1555), Caco-2 colorectal adenocarcinoma cells (ATCC HTB-37), HRT-18 colorectal adenocarcinoma cells (ATCC CCL-244), HT-29 colorectal adenocarcinoma cells (ATCC HTB-38), human neonatal keratinocytes and MCF10A epithelial cells (ATCC CRL-10317) (see, e.g., Olive et al. (1993) In Vitro Cell Dev Biol. 29A(3 Pt 1):239-248; Wu et al. (1995) J. Clin. Invest. 95(4): 1897-1905). Exemplary cells that can be used in the cell based assays described herein include any cells described herein or known in the art, including, for example, tumor or cancer cells described herein.

[0820] In some examples, assays to measure the activity of an anti-EGFR antibody, such as modified anti-EGFR antibodies provided herein, such as the assays described herein, are performed using cell lines from a tissue associated with a side effect of anti-EGFR antibodies, such as any side effect described herein or known in the art. For example, assays can be performed using skin cell lines. EGFR is expressed in several cell types, including keratinocytes, such as basal keratinocytes and the outer root sheath of hair follicles; and cells of eccrine and sebaceous glands (Albanell et al. (2002) J. Clin. Oncol. 20(1):110-124; Lacouture, and Melosky (2007) Skin Therapy Lett. 12, 1-5; Nanney et al. (1990) J. Invest. Dermatol 94(6):742-748).

[0821] In some examples, cell-based assays to measure activity of the anti-EGFR antibodies provided herein are performed using keratinocytes, such as, for example, human neonatal keratinocytes; cells from the outer root sheath of hair follicles; and cells of eccrine and sebaceous glands. Other cells that can be used in cell-based assays to measure activity of the anti-EGFR antibodies provided herein include, for example, melanocytes, such as, for example, newborn melanocytes; Langerhans cells; fibroblasts; Merkel's cells; nerve cells; glandular cells; sebaceous gland cells (sebocytes); and fibroblasts, such as, for example dermal fibroblasts and wound fibroblasts. Methods of culturing such cells are within the ability of the skilled artisan (see, e.g., Limat and Hunziker (1996) Methods Mol Med. 2:21-31; Abdel-Naser et al. (2005) Egypt. Dermatol. Online J. 1(2):1).

[0822] Cell lines expressing EGFR can be generated by transient or stable transfection. In addition, any primary cell or cell line can be assessed for expression of EGFR, such as by using fluorescently labeled anti-EGFR antibodies and fluorescence activated cell sorting (FACS). Exemplary cell lines include A549 (lung), HeLa, Jurkat, BJAB, Colo205, H1299, MCF7, MDA-MB-231, PC3, HUMEC, HUVEC, and PrEC.

[0823] Activity of the modified anti-EGFR antibodies provided herein, can be assessed, for example, using any assay that can detect the binding to the surface of the cells. Activity also can be assessed by assessing a functional activity of the anti-EGFR antibodies. In some examples, the assays are based on the biology of the ability of the anti-EGFR antibody to bind to EGFR and mediate some biochemical event, for example, effector functions like cellular lysis, phagocytosis, ligand/receptor binding inhibition, inhibition of growth and/or proliferation and apoptosis.

[0824] Such assays often involve monitoring the response of cells to a modified anti-EGFR antibody, for example cell survival, cell death, cellular phagocytosis, cell lysis, change in cellular morphology, or transcriptional activation such as cellular expression of a natural gene or reporter gene. For example, cell proliferation assays, cell death assays, flow cytometry, cell separation techniques, fluorescence activated cell sorting (FACS), phase microscopy, fluorescence microscopy, receptor binding assays, cell signaling assays, immunocytochemistry, reporter gene assays, cellular morphology (e.g., cell volume, nuclear volume, cell perimeter, and nuclear perimeter), ligand binding, substrate binding, nuclease activity, apoptosis, chemotaxis or cell migrations, cell surface marker expression, cellular proliferation, GFP positivity and dye dilution assays (e.g., cell tracker assays with dyes that bind to cell membranes), DNA synthesis assays (e.g., 3H-thymidine and fluorescent DNA-binding dyes such as BrdU or Hoechst dye with FACS analysis) and nuclear foci assays, are all suitable assays to measure the activity of the modified anti-EGFR antibodies provided herein. Other functional activities that can be measured include, but are not limited to, ligand binding, substrate binding, endonuclease and/or exonuclease activity, transcriptional changes to both known and uncharacterized genetic markers (e.g., northern blots), changes in cell metabolism, changes related to cellular proliferation, cell surface marker expression, DNA synthesis, marker and dye dilution assays (e.g., GFP and cell tracker assays), contact inhibition, tumor growth in nude mice, and others.

[0825] For example, modified anti-EGFR antibodies provided herein can be assessed for their modulation of one or more phenotypes of a cell known to express EGFR. Phenotypic assays, kits and reagents for their use are well-known to those skilled in the art and are herein used to measure the activity of modified anti-EGFR antibodies. Representative phenotypic assays, which can be purchased from any one of several commercial vendors, include those for determining cell viability, cytotoxicity, proliferation or cell survival (Molecular Probes, Eugene, Oreg.; PerkinElmer, Boston, Mass.), protein-based assays including enzymatic assays (Panvera, LLC, Madison, Wis.; BD Biosciences, Franklin Lakes, N.J.; Oncogene Research Products, San Diego, Calif.), cell regulation, signal transduction, inflammation, oxidative processes and apoptosis (Assay Designs Inc., Ann Arbor, Mich.), triglyceride accumulation (Sigma-Aldrich, St. Louis, Mo.), angiogenesis assays, tube formation assays, cytokine and hormone assays and metabolic assays (Chemicon International Inc., Temecula, Calif.; Amersham Biosciences, Piscataway, N.J.).

[0826] Cells determined to be appropriate for a particular phenotypic assay (i.e., any cell described herein or known in the art to express EGFR) can be treated with an anti-EGFR antibody as well as control antibody. In some examples, EGF, or a fragment thereof, is included so that activation of the receptor is effected. At the end of the treatment period, treated and untreated cells can be analyzed by one or more methods described herein or known in the art. In some examples, activity of the anti-EGFR antibodies provided herein can be assessed by measuring changes in cell morphology, measuring EGFR phosphorylation or cell proliferation.

[0827] The assays can be performed to assess the effects of an anti-EGFR antibody, such as a modified anti-EGFR antibody, on EGFR and/or on cells that express EGFR. In some examples, the activity of EGFR can be stimulated in the presence of EGF or another stimulating agent in the presence or absence of the anti-EGFR antibody provided herein to determine if the antibody modulates (e.g., inhibits) the actions of EGF or another stimulating agent. For example, the anti-EGFR antibody can act by blocking the ability of EGF to interact with EGFR. Thus, the modified anti-EGFR antibodies provided herein also can be tested for antagonistic properties.

[0828] For example, EGFR phosphorylation assays can be used to measure the ability of the anti-EGFR antibodies provided herein to inhibit phosphorylation of EGFR. Binding of EGF to the extracellular domain of EGFR induces receptor dimerization, and tyrosine phosphorylation, and can result in uncontrolled proliferation (Seshacharyulu et al. (2012) Expert. Opin. Ther. Targets. 16(1):15-31). Modified anti-EGFR antibodies provided herein, can inhibit EGF binding to EGFR and decrease EGFR phosphorylation (see, e.g., U.S. Pat. No. 8,071,093). Thus, activity of an anti-EGFR antibody provided herein can be assessed by detecting phosphorylated EGFR. In some examples, phosphorylated EGFR can be detected in cell lysates by an ELISA assay using methods known in the art or described herein (see, e.g., Example 8). The dose-dependence of the modified anti-EGFR antibodies on the inhibitory effect can be determined by plotting the concentration of phosphorylated EGFR against the concentration of modified anti-EGFR antibody. Tyrosine phosphorylated forms of EGFR can be detected using EGFR Phospho ELISA kits available from, e.g., Sigma-Aldrich (St. Louis, Mo.), RAYBIO (Norcross, Ga.) or Thermo Scientific (Rockford, Ill.).

[0829] Growth assays can be used to measure the activity of the modified anti-EGFR antibodies. The assays can measure growth inhibition of cells that express EGFR by an anti-EGFR antibody, such as a modified anti-EGFR antibody. Cells can be incubated for a sufficient time for cells to grow (e.g., 12 hours, or 1, 2, 3, 4, 5, 6, 7 days or longer). Cell growth can be measured by any method known in the art, including ³H-thymidine incorporation assay, 5-bromo-2-deoxyuridine (BrdU) ELISA, tetrazolium microplate assay and acid phosphatase assay (e.g., Maghni et al. (1999) J. Immunol. Method. 223(2):185-194). Cell growth can also be measured using kits available from Invitrogen (Cyquant NF cell proliferation assay kit), Cambrex (ViaLight HS (high sensitivity) BioAssay), Promega (CellTiter-Glo Luminescent Cell Viability Assay, Guava Technologies (CellGrowth assay), Stratagene (Quantos cell proliferation assay) (e.g., Assays for Cell Proliferation Studies, Genetic Eng. Biotechnol. News. 26(6)). In some examples, the cell growth can be normalized to growth of cells without antibody. In exemplary growth assays, cells can be added to a well of a 96-well plate in normal growth medium that includes the anti-EGFR antibody to be assayed. An exemplary cell growth assay is described in Example 9.

[0830] 3. Animal Models

[0831] In vivo studies using animal models also can be performed to assess the therapeutic activity of modified anti-EGFR antibodies provided herein. An anti-EGFR antibody can be administered to animal models of the diseases and conditions for which therapy using a modified anti-EGFR antibody provided herein is considered. Such animal models are known in the art, and include, but are not limited to, xenogenic cancer models wherein human cancer explants or passaged xenograft tissues are introduced into immune compromised animals, such as nude or SCID mice, (see e.g., Klein. et al. (1997) Nature Medicine 3:402-408). Efficacy can be predicted using assays that measure inhibition of tumor formation, tumor regression or metastasis Animal models also can be used to assess side effects of the anti-EGFR antibodies provided herein.

[0832] Various tumor cell lines or tumor animal models are known to one of skill in the art and are described herein. Activity of the anti-EGFR antibodies can be assessed by monitoring parameters indicative of treatment of a disease or condition that can be treated by administration of anti-EGFR antibodies. For example, an anti-EGFR antibody can be administered to a tumor-bearing animal followed by monitoring body weight and tumor volume. For example, a parameter indicative of anti-tumorigenicity is shrinkage of tumor size and/or delay in tumor progression. Hence, for example, anti-EGFR antibodies can be assessed to identify those that decrease tumor growth or size. Tumor size can be assessed in vivo in tumor-bearing human or animal models treated with an anti-EGFR antibody. Tumor shrinkage or tumor size can be assessed by various assays known in art, such as, by weight, volume or physical measurement. The anti-EGFR antibody also can be administered to normal animals, and body weights monitored to assess adverse side effects associate with administering the anti-EGFR antibody.

[0833] In vivo tumors can be generated in animals by any known method, including xenograft tumors generated by inoculating or implanting tumor cells (e.g., by subcutaneous injection) into an immunodeficient rodent, syngenic tumors models generated by inoculating (e.g., by subcutaneous injection) a mouse or rat tumor cell line into the corresponding immunocompetent mouse or rat strain, metastatic tumors generated by metastasis of a primary tumor implanted in the animal model, allograft tumors generated by the implantation of tumor cells into same species as the origin of the tumor cells, and spontaneous tumors generated by genetic manipulation of the animal. The tumor models can be generated orthotopically by injection of the tumor cells into the tissue or organ of their origin, for example, implantation of breast tumor cells into a mouse mammary fat pad. In some examples, xenograft models or syngenic models are used. For example, tumors can be established by subcutaneous injection at the right armpit with a tumor cell suspension (e.g., 1×10⁶ to 5×10⁶ cells/animal) into immunocompetent hosts (syngeneic) or immunodeficient hosts (e.g., nude or SCID mice; xenograft). The animal models include models in any organism described herein or known in the art, such as, for example, a mammal, including monkeys and mice.

[0834] The tumor can be syngeneic, allogeneic, or xenogeneic. The tumor can express endogenous or exogenous EGFR. Exogenous EGFR expression can be achieved using methods of recombinant expression known in the art or described herein via transfection or transduction of the cells with the appropriate nucleic acid. Exemplary cell lines include EGFR transfected NIH3T3, MCF7 (human mammary), human epidermoid squamous carcinoma A431, oral squamous cell carcinoma (OSCC) cell line BcaCD885, COLO 356/FG pancreatic cell lines, colorectal carcinoma cell lines, HT29 or LS174T, and MDA-MB-231 triple negative breast cancer cell lines (see e.g., Santon et al., (1986) Cancer Res. 46:4701-05 and Ozawa et al., (1987) Int. J. Cancer 40:706-10; U.S. Pat. Pub. No. 20110111059; Reusch et al. (2006) Clin. Cancer Res. 12(1):183-190; and Yang et al. (2011) Int. J. Nanomedicine 6:1739-1745).

[0835] The modified anti-EGFR antibodies provided herein can be tested in a variety of orthotopic tumor models. These animal models are used by the skilled artisan to study pathophysiology and therapy of aggressive cancers such as, for example, pancreatic, prostate and breast cancer Immune deprived mice including, but not limited to athymic nude or SCID mice can be used in scoring of local and systemic tumor spread from the site of intraorgan (e.g., pancreas, prostate or mammary gland) injection of human tumor cells or fragments of donor patients.

[0836] In some examples, the testing of anti-EGFR targeting proteins can include study of efficacy in primates (e.g., cynomolgus monkey model) to facilitate the evaluation of depletion of specific target cells harboring EGFR antigen. Additional primate models include but are not limited to that of the rhesus monkey.

[0837] For example, the recipient of the tumor can be any suitable murine strain. The recipient can be immunocompetent or immunocompromised in one or more immune-related functions, including but not limited to nu/nu, SCID, and beige mice. Examples of animals in which tumor cells can be transplanted include BALB/c mice, C57BL/6 mice, severe combined immunodeficient/Beige mice (SCID-Beige) (see, e.g., U.S. Pat. Pub. No. 20110111059; Reusch et al. (2006) Clin. Cancer Res. 12(1):183-190; Yang et al. (2011) Int. J. Nanomedicine 6:1739-1745). Other examples include nude mice, SCID mice, xenograft mice, and transgenic mice (including knockins and knockouts). For example, an anti-EGFR antibody provided herein can be tested in a mouse cancer model, for example a xenograft mouse. In this method, a tumor or tumor cell line is grafted onto or injected into a mouse, and subsequently the mouse is treated with an anti-EGFR antibody to determine the ability of the anti-EGFR antibody to reduce or inhibit cancer growth and metastasis. Also contemplated is the use of a SCID murine model in which immune-deficient mice are injected with human peripheral blood lymphocytes (PBLs).

[0838] Exemplary human tumor xenograft models in mice, such as nude or SCID mice, include, but are not limited to, human lung carcinoma (A549 cells, ATCC No. CCL-185); human breast tumor (GI-101A cells, Rathinavelu et al., (1999) Cancer Biochem. Biophys., 17:133-146 or MDA-MB-231 triple negative breast cancer cells); human ovarian carcinoma (OVCAR-3 cells, ATCC No. HTB-161); human pancreatic carcinoma (PANC-1cells, ATCC No. CRL-1469 and MIA PaCa-2 cells, ATCC No. CRL-1420); DU145 cells (human prostate cancer cells, ATCC No. HTB-81); human prostate cancer (PC-3 cells, ATCC# CRL-1435); colon carcinoma (HT-29 cells); human melanoma (888-MEL cells, 1858-MEL cells or 1936-MEL cells; see e.g., Wang et al., (2006) J. Invest. Dermatol. 126:1372-1377); and human fibrosarcoma (HT-1080 cells, ATCC No. CCL-121,) and human mesothelioma (MSTO-211H cells). Exemplary rat tumor xenograft models in mice include, but are not limited to, glioma tumor (C6 cells; ATCC No. CCL-107). Exemplary mouse tumor homograft models include, but are not limited to, mouse melanoma (B16-F10 cells; ATCC No. CRL-6475). Exemplary cat tumor xenograft models in mice include, but are not limited to, feline fibrosarcoma (FC77.T cells; ATCC No. CRL-6105). Exemplary dog tumor xenograft models in mice include, but are not limited to, canine osteosarcoma (D17 cells; ATCC No. CCL-183). Non-limiting examples of human xenograft models and syngeneic tumor models are set forth in the Tables 14 and 15 below.

TABLE 14
Human Tumor Xenograft Models

| | Cell Line | | |
|---|---|---|---|
| Tumor Type | Name | Tumor Type | Cell Line |
| Adenoid cystic | ACC-2 | Kidney carcinoma | Ketr-3 |
| carcinoma | | | |
| Bladder carcinoma | EJ | Leukemia | HL-60 |
| Bladder carcinoma | T24 | Liver carcinoma | Bel-7402 |
| Breast carcinoma | BCaP-37 | Liver carcinoma | HepG-2 |
| Breast carcinoma | MDA-MB-231 | Liver carcinoma | QGY-7701 |
| Breast carcinoma | MX-1 | Liver carcinoma | SMMC7721 |
| Cervical carcinoma | SiHa | Lung carcinoma | A549 |
| Cervical carcinoma | HeLa | Lung carcinoma | NCI-H460 |
| Colon carcinoma | Ls-174-T | Melanoma | A375 |
| Colon carcinoma | CL187 | Melanoma | M14 |
| Colon carcinoma | HCT-116 | Melanoma | MV3 |
| Colon carcinoma | SW116 | Ovary carcinoma | A2780 |
| Gastric carcinoma | MGC-803 | Pancreatic | BXPC-3 |
| | | carcinoma | |
| Gastric carcinoma | SGC-7901 | Prostate carcinoma | PC-3M |
| Gastric carcinoma | BGC-823 | Tongue carcinoma | Tca-8113 |

TABLE 15
Syngeneic Mouse Tumor Model

| Tumor Type | Cell Line Name | Strain of Mice |
|---|---|---|
| Cervical carcinoma | U14 | ICR |
| Liver carcinoma | H22 | ICR |
| Lung carcinoma | Lewis | C57BL6 |
| Melanoma | B16F1, B16F10, B16BL6 | C57BL6 |
| Sarcoma | S180 | ICR |

[0839] The route of administration for the modified anti-EGFR antibodies can be any route of administration described herein or known in the art, such as intraperitoneal, intratumoral or intravenous administration. The anti-EGFR antibodies can be administered at varying dosages described herein or known in the art. For example, the modified anti-EGFR antibodies can be administered to tumor-bearing animals at or between, for example, about 0.1 mg/kg, 0.15 mg/kg, 0.2 mg/kg, 0.25 mg/kg, 0.30 mg/kg, 0.35 mg/kg, 0.40 mg/kg, 0.45 mg/kg, 0.5 mg/kg, 0.55 mg·kg, 0.6 mg/kg, 0.7 mg/kg, 0.8 mg/kg, 0.9 mg/kg, 1.0 mg/kg, 1.1 mg/kg, 1.2 mg/kg, 1.3 mg/kg, 1.4 mg/kg, 1.5 mg/kg, 1.6 mg/kg, 1.7 mg/kg, 1.8 mg/kg, 1.9 mg/kg, 2 mg/kg, 2.5 mg/kg, 3 mg/kg, 3.5 mg/kg, 4 mg/kg, 4.5 mg/kg, 5 mg/kg, 5.5 mg/kg, 6 mg/kg, 6.5 mg/kg, 7 mg/kg, 7.5 mg/kg, 8 mg/kg, 8.5 mg/kg, 9 mg/kg, 9.5 mg/kg, 10 mg/kg, 11 mg/kg, 12 mg/kg, 13 mg/kg, 14 mg/kg, 15 mg/kg, 16 mg/kg, 17 mg/kg, 18 mg/kg, 19 mg/kg, 20 mg/kg, 21 mg/kg, 22 mg/kg, 23 mg/kg, 24 mg/kg, 25 mg/kg, 30 mg/kg, 40 mg/kg, 50 mg/kg, 60 mg/kg, 70 mg/kg, 80 mg/kg, 90 mg/kg, 100 mg/kg or more.

[0840] In some examples, exemplary dosages include, but are not limited to, about or 0.01 mg/m² to about or 800 mg/m², such as for example, about or 0.01 mg/m², about or 0.1 mg/m², about or 0.5 mg/m², about or 1 mg/m², about or 5 mg/m², about or 10 mg/m², about or 15 mg/m², about or 20 mg/m², about or 25 mg/m², about or 30 mg/m², about or 35 mg/m², about or 40 mg/m², about or 45 mg/m², about or 50 mg/m², about or 100 mg/m², about or 150 mg/m², about or 200 mg/m², about or 250 mg/m², about or 300 mg/m², about or 400 mg/m², about or 500 mg/m², about or 600 mg/m² and about or 700 mg/m². It is understood that one of skill in the art can recognize and convert dosages between units of mg/kg and mg/m² (see, e.g., Michael J. Derelanko, TOXICOLOGIST'S POCKET HANDBOOK, CRC Press, p. 16 (2000)).

[0841] Tumor size and volume can be monitored based on techniques known to one of skill in the art. For example, tumor size and volume can be monitored by radiography, ultrasound imaging, necropsy, by use of calipers, by microCT or by ¹⁸F-FDG-PET. Tumor size also can be assessed visually. In particular examples, tumor size (diameter) is measured directly using calipers. In other examples, tumor volume can be measured using an average of measurements of tumor diameter (D) obtained by caliper or ultrasound assessments.

[0842] The volume can be determined from the formula V=D³×π/6 (for diameter measured using calipers); the formula V=[length×(width)²]/2 where length is the longest diameter and width is the shortest diameter perpendicular to length; or V=D²×d×π/6 (for diameter measured using ultrasound where d is the depth or thickness). For example, caliper measurements can be made of the tumor length (l) and width (w) and tumor volume calculated as length×width×0.52.

[0843] In another example, microCT scans can be used to measure tumor volume (see e.g., Huang et al. (2009) PNAS, 106:3426-3430). In such an example, mice can be injected with Optiray Pharmacy ioversol injection 74% contrast medium (e.g., 741 mg of ioversol/mL), mice anesthetized, and CT scanning done using a MicroCat 1A scanner or other similar scanner (e.g., IMTek) (40 kV, 600 μA, 196 rotation steps, total angle or rotation=196). The images can be reconstructed using software (e.g., RVA3 software program; ImTek). Tumor volumes can be determined by using available software (e.g., Amira 3.1 software; Mercury Computer Systems). In some examples, the tumor is injected subcutaneously at day 0, and the volume of the primary tumor can be measured at designated time points.

[0844] Once the implanted tumors reach a predetermined size or volume, the modified anti-EGFR antibody can be administered. Progressing tumors can be visualized and tumor size and tumor volume can be measured using any technique known to one of skill in the art. For example, tumor volume or tumor size can be measured using any of the techniques described herein. Tumor volume and size can be assessed or measured at periodic intervals over a period of time following administration of the modified anti-EGFR antibodies provided herein, such as, for example, every hour, every 6 hours, every 12 hours, every 24 hours, every 36 hours, every 2 days, every 3 days, every 4 days, every 5 days, every 6 days, every 7-days, every week, every 3 weeks, every month or more post-infection. A graph of the median change in tumor volume over time can be made. This is exemplified in Example 10. The total area under the curve (AUC) can be calculated. A therapeutic index also can be calculated using the formula AUC_{untreated animals}−AUC_{treated animals}/AUC_{untreated}×100.

[0845] Generally, tumor-bearing animals generated in the same manner, at the same time and with the same type of tumor cells are used as controls. Such control tumor-bearing animals include those that remain untreated (not administered modified anti-EGFR antibody). Additional controls animals include those administered an anti-EGFR antibody known in the art. An example of such anti-EGFR antibodies is Cetuximab. In examples where tumor-bearing animals are administered a known anti-EGFR antibody as a control, the amount of control antibody administered can be the same as the amount of the modified anti-EGFR antibody.

[0846] Assessment of the activity of a modified anti-EGFR antibody can include identifying antibodies that mediate a decrease in tumor size (e.g., diameter), volume or weight compared to control treated or untreated tumor-bearing animals. It is understood that a decrease in tumor size, volume or weight compared to control treated or untreated tumor-bearing animals means that the anti-EGFR antibody itself is mediating tumor regression or shrinkage or that the anti-EGFR antibody is mediating delayed tumor progression compared to control treated or untreated tumor-bearing animals. Tumor shrinkage or delay in tumor progression are parameters indicative of anti-tumorigenicity.

[0847] For example, an anti-EGFR antibody can be identified as mediating a decrease in tumor size or volume based on visual assessment of tumor size in the animal compared to control treated or untreated tumor-bearing animals. In other examples, an anti-EGFR antibody is identified as mediating a decrease in tumor size or volume if the tumor size is decreased in diameter as assessed by any measurement known in the art (e.g., use of calipers) compared to an untreated tumor-bearing animal or compared to a tumor-bearing animal treated with a reference anti-EGFR antibody. It is understood that comparison of tumor size or volume can be made at any predetermined time post-infection, and can be empirically determined by one of skill in the art. In some examples, a comparison can be made at the day in which the untreated control is sacrificed. In other examples, analysis of the total AUC can be made, and AUC values compared as an indicator of the size and volume of the tumor over the time period.

[0848] Effects of a modified anti-EGFR antibody on tumor size or volume can be presented as a ratio of tumor size or volume at a designated time post-administration of the control treated animal compared to the anti-EGFR antibody-treated animal (tumor size or volume of control-treated animals/tumor size or volume of modified anti-EGFR antibody-treated animals). Assessment can include identifying an anti-EGFR antibody that results in animals exhibiting a ratio of tumor shrinkage that is greater than 1.0, for example, that is greater than 1.1, 1.2, 1.3, 1.4, 1.5, 1.6, 1.7, 1.8, 1.9, 2, 3, 4, 5, 6, 7, 8, 9, 10, 20, 30, 40, 50 or more. In particular examples, the results are presented as a ratio of the total AUC area during the course of treatment (AUC of tumor size or volume of control-treated animals/AUC tumor size or volume of modified anti-EGFR antibody-treated animals). An anti-EGFR antibody can be selected that results in a ratio of tumor shrinkage in a subject as measured by AUC that is greater than 1.1, 1.2, 1.3, 1.4, 1.5, 1.6, 1.7, 1.8, 1.9, 2, 3, 4, 5, 6, 7, 8, 9, 10, 20, 30, 40, 50 or more. It is understood that a ratio of 1.2 or 5 means that the modified anti-EGFR antibody effects a decreased tumor size or volume and results in 120% or 500% anti-tumorigenicity activity compared to the reference or control.

[0849] In particular examples, the therapeutic index is determined as a measure of effects of an anti-EGFR antibody, such as a modified anti-EGFR antibody, on tumor size or volume. An anti-EGFR antibody can have a therapeutic index that is at least or about at least or 120%, 130%, 140%, 150%, 160%, 170%, 180%, 190%, 200%, 250%, 300%, 400%, 500%, 600%, 700%, 800% or more compared to the therapeutic index of a control anti-EGFR antibody.

[0850] In additional examples, tumors can be harvested from the animals and weighed. Administration of anti-EGFR antibodies can result in a decrease in tumor weight compared to tumor harvested from control tumor-bearing animals. The weight also can be compared to tumors harvested from control treated animals at the same time post-administration. The change in weight can be presented as a ratio of the tumor weight (tumor weight control treated animals/tumor weights of anti-EGFR-treated animals). An anti-EGFR antibody can result in subjects exhibiting a ratio of tumor weight that is greater than 1.0, for example, that is greater than 1.1, 1.2, 1.3, 1.4, 1.5, 1.6, 1.7, 1.8, 1.9, 2, 3, 4, 5, 6, 7, 8, 9, 10, 20, 30, 40, 50 or more. It is understood that a ratio of tumor weight that is 1.2 or 5 means that the anti-EGFR antibody effects a decreased tumor weight and results in 120% or 500% anti-tumorigenicity activity compared to the reference or control.

[0851] In particular examples, the effect of the anti-EGFR antibody on other organs or tissues in the animal can be assessed. For example, other organs can be harvested from the animals, weighed and/or examined.

[0852] Animal studies also can be performed to assess adverse side effects, such as side effects that cannot be evaluated in a standard pharmacology profile or occur only after repeated administration of the modified anti-EGFR antibody. The assessed side effects of a modified anti-EGFR antibody can include any side effect of anti-EGFR antibodies described herein or known in the art, including skin toxicities and hypomagnesemia. For example, known side effects of Cetuximab include any described herein and/or known to one of skill in the art, including symptomatic hypomagnesemia, paronychia, fever, dermatologic toxicity, papulopustular rash of the face and upper trunk, hair growth abnormalities, loss of scalp hair, increased growth of facial hair and eyelashes, dry and itchy skin, and periungual inflammation with tenderness (Eng (2009) Nat. Rev. 6:207-218; Schrag et al. J. Natl. Cancer Inst. 97(16):1221-1224; Lacouture, and Melosky (2007) Skin Therapy Lett. 12:1-5). Other parameters that can be measured to assess side effects include standard measurement of food consumption, bodyweight, antibody formation, clinical chemistry, and macro- and microscopic examination of standard organs/tissues (e.g., cardiotoxicity). Additional parameters of measurement include injection site trauma and the measurement of any neutralizing antibodies.

[0853] For example, as described elsewhere herein, hypomagnesemia can be diagnosed and/or assessed by measurement of serum magnesium levels. Papulopustular rash and acneiform rash can be characterized in animal models, such as mouse models and cynomolgus monkey models, by observing eruptions consisting of papules (a small, raised pimple) and pustules (a small pus filled blister). Dry skin, can be characterized by flaky and dull skin, fine pores, and papery thin skin texture. Skin hyperpigmentation can be characterized by darkening of the skin due to excessive melanin deposition. Pruritus can be evaluated by observing animal scratching. Paronychia can be evaluated by examination.

[0854] In some examples, the presence of skin toxicities can be evaluated in mouse models in which human skin is grafted onto mice (see, e.g., Nanney et al. (1996) J. Invest. Dermatol. 106(6):1169-1174). It addition, dermatologic side effects can be assessed in other animal models. For example, in cynomolgus monkeys, inflammation at the injection site and desquamation of the external integument after cetuximab administration can be assessed. Similar effects can be observed in the epithelial mucosa of the nasal passage, esophagus, and tongue, and degenerative changes in the renal tubular epithelium. Other epithelial toxicities that can be assessed include conjunctivitis, reddened and swollen eyes, and signs of intestinal disturbance (see, e.g., Lutterbuese et al. (2010) Proc. Natl. Acad. Sci. 107(28):12605-12610; European Medicines Agency (2009) Summary of product characteristics (Erbitux)).

[0855] Side effects can be assessed in healthy animal models or in animal models of a disease or condition, such as the animal models described herein. In some examples, such assays can be performed in two species (e.g., a rodent and a non-rodent) to ensure that any unexpected adverse effects are not overlooked. In general, these models can measure a variety of toxicities including genotoxicity, chronic toxicity, immunogenicity, reproductive/developmental toxicity, carcinogenicity.

[0856] 4. Pharmacokinetics and Pharmacodynamics Assays

[0857] Pharmacokinetics (PK) and pharmacodynamics (PD) assays of the modified anti-EGFR antibodies provided herein can be performed using methods described herein or known in the art (see, e.g., Klutchko, et al., (1998) J. Med. Chem. 41:3276-3292). Examples of parameters of measurement generally include the maximum (peak) plasma concentration (Cₘₐₓ), the peak time (i.e., when maximum plasma concentration occurs; Tₘₐₓ), the minimum plasma concentration (i.e., the minimum plasma concentration between doses; Cₘᵢₙ), the elimination half-life (T_{1/2}) and area under the curve (i.e., the area under the curve generated by plotting time versus plasma concentration; AUC), following administration. The absolute bioavailability of administered modified anti-EGFR antibody can be determined by comparing the area under the curve following subcutaneous delivery (AUC_{sc}) with the AUC following intravenous delivery (AUCᵢᵥ). Absolute bioavailability (F), can be calculated using the formula: F=([AUC]_{sc}×dose_{sc})/([AUC]ᵢᵥ×doseᵢᵥ). The concentration of anti-EGFR antibody in the plasma following administration can be measured using any method known in the art suitable for assessing concentrations of antibody in samples of blood. Exemplary methods include, but are not limited to, ELISA and nephelometry. Additional measured parameters can include compartmental analysis of concentration-time data obtained following intravenous administration and bioavailability. Biodistribution, dosimetry (for radiolabeled antibodies or Fc fusions), and PK studies can also be done in animal models, including animal models described herein or known in the art, including rodent models. Such studies can evaluate tolerance at some or all doses administered, toxicity to local tissues, preferential localization to rodent xenograft animal models and depletion of target cells (e.g., CD20 positive cells). Pharmacodynamic studies can include, but are not limited to, targeting specific tumor cells or blocking signaling mechanisms, measuring depletion of EGFR expressing cells or signals.

[0858] PK and PD assays can be performed in any animal model described herein or known in the art, including healthy animal models, diseased animal models and humans. Screening the modified anti-EGFR antibodies for PD and/or PK properties can be useful for defining the optimal balance of PD, PK, and therapeutic efficacy conferred by the modified anti-EGFR antibodies. For example, it is known in the art that the array of Fc receptors is differentially expressed on various immune cell types, as well as in different tissues. Differential tissue distribution of Fc receptors can affect the pharmacodynamic (PD) and pharmacokinetic (PK) properties of the modified anti-EGFR antibodies provided herein.

[0859] A range of doses and different dosing frequency of dosing can be administered in the pharmacokinetic studies to assess the effect of increasing or decreasing concentrations of the modified anti-EGFR antibody in the dose. Pharmacokinetic properties, such as bioavailability, of the administered modified anti-EGFR antibody, can be assessed with or without co-administration of a therapeutic agent or regimen described herein. For example, dogs, such as beagles, can be administered a modified anti-EGFR antibody alone or with one or more therapeutic agents or regimens described herein. The modified anti-EGFR antibody can be administered before, during or after administration of a therapeutic agent or regimen. Blood samples can then be taken at various time points and the amount of modified anti-EGFR antibody in the plasma determined, such as by nephelometry. The AUC can then be measured and the bioavailability of administered modified anti-EGFR antibody with or without co-administration of the additional therapeutic agent(s) or regimen(s) can be determined Such studies can be performed to assess the effect of co-administration on pharmacokinetic properties, such as bioavailability, of administered anti-EGFR antibody.

[0860] Single or repeated administration(s) of the modified anti-EGFR antibodies can occur over a dose range of about 6000-fold (about 0.05-300 mg/kg) to evaluate the half-life using plasma concentration and clearance as well as volume of distribution at a steady state and level of systemic absorbance can be measured.

### F. PHARMACEUTICAL COMPOSITIONS, FORMULATIONS, KITS, ARTICLES OF MANUFACTURE AND COMBINATIONS

[0861] 1. Pharmaceutical Compositions and Formulations

[0862] Pharmaceutical compositions containing any of the modified anti-EGFR antibodies, or antigen-binding fragments thereof, provided herein are provided for administration. Pharmaceutically acceptable compositions are prepared in view of approvals for a regulatory agency or other agency prepared in accordance with generally recognized pharmacopeia for use in animals and in humans. Typically, the compounds are formulated into pharmaceutical compositions using techniques and procedures well-known in the art (see e.g., Ansel Introduction to Pharmaceutical Dosage Forms, Fourth Edition, 1985, 126).

[0863] The pharmaceutical composition can be used for therapeutic, prophylactic, and/or diagnostic applications. The anti-EGFR antibodies provided herein can be formulated with a pharmaceutical acceptable carrier or diluent. Generally, such pharmaceutical compositions utilize components which will not significantly impair the biological properties of the antibody, such as the binding of to its specific epitope (e.g., binding to EGFR). Each component is pharmaceutically and physiologically acceptable in the sense of being compatible with the other ingredients and not injurious to the patient. The formulations can conveniently be presented in unit dosage form and can be prepared by methods well-known in the art of pharmacy, including but not limited to, tablets, pills, powders, liquid solutions or suspensions (e.g., including injectable, ingestible and topical formulations (e.g., eye drops, gels, pastes, creams, or ointments), aerosols (e.g., nasal sprays), liposomes, suppositories, pessaries, injectable and infusible solution and sustained release forms. See, e.g., Gilman, et al. (eds. 1990) Goodman and Gilman's: The Pharmacological Bases of Therapeutics, 8th Ed., Pergamon Press; and Remington's Pharmaceutical Sciences, 17th ed. (1990), Mack Publishing Co., Easton, Pa.; Avis, et al. (eds. 1993) Pharmaceutical Dosage Forms: Parenteral Medications Dekker, NY; Lieberman, et al. (eds. 1990) Pharmaceutical Dosage Forms: Tablets Dekker, NY; and Lieberman, et al. (eds. 1990) Pharmaceutical Dosage Forms: Disperse Systems Dekker, NY. When administered systematically, the therapeutic composition is sterile, pyrogen-free, generally free of particulate matter, and in a parenterally acceptable solution having due regard for pH, isotonicity, and stability. These conditions are known to those skilled in the art. Methods for preparing parenterally administrable compositions are well-known or will be apparent to those skilled in the art and are described in more detail in, e.g., “Remington: The Science and Practice of Pharmacy (Formerly Remington's Pharmaceutical Sciences)”, 19th ed., Mack Publishing Company, Easton, Pa. (1995).

[0864] Pharmaceutical compositions provided herein can be in various forms, e.g., in solid, semi-solid, liquid, powder, aqueous, or lyophilized form. Examples of suitable pharmaceutical carriers are known in the art and include but are not limited to water, buffering agents, saline solutions, phosphate buffered saline solutions, various types of wetting agents, sterile solutions, alcohols, gum arabic, vegetable oils, benzyl alcohols, gelatin, glycerin, carbohydrates such as lactose, sucrose, amylose or starch, magnesium stearate, talc, silicic acid, viscous paraffin, perfume oil, fatty acid monoglycerides and diglycerides, pentaerythritol fatty acid esters, hydroxy methylcellulose, powders, among others. Pharmaceutical compositions provided herein can contain other additives including, for example, antioxidants, preservatives, antimicrobial agents, analgesic agents, binders, disintegrants, coloring, diluents, excipients, extenders, glidants, solubilizers, stabilizers, tonicity agents, vehicles, viscosity agents, flavoring agents, emulsions, such as oil/water emulsions, emulsifying and suspending agents, such as acacia, agar, alginic acid, sodium alginate, bentonite, carbomer, carrageenan, carboxymethylcellulose, cellulose, cholesterol, gelatin, hydroxyethyl cellulose, hydroxypropyl cellulose, hydroxypropyl methylcellulose, methylcellulose, octoxynol-9, oleyl alcohol, povidone, propylene glycol monostearate, sodium lauryl sulfate, sorbitan esters, stearyl alcohol, tragacanth, xanthan gum, and derivatives thereof, solvents, and miscellaneous ingredients such as crystalline cellulose, microcrystalline cellulose, citric acid, dextrin, dextrose, liquid glucose, lactic acid, lactose, magnesium chloride, potassium metaphosphate, starch, among others (see, generally, Alfonso R. Gennaro (2000) Remington: The Science and Practice of Pharmacy, 20th Edition. Baltimore, Md.: Lippincott Williams & Wilkins). Such carriers and/or additives can be formulated by conventional methods and can be administered to the subject at a suitable dose. Stabilizing agents such as lipids, nuclease inhibitors, polymers, and chelating agents can preserve the compositions from degradation within the body.

[0865] The route of antibody administration is in accord with known methods, e.g., injection or infusion by intravenous, intraperitoneal, intracerebral, intramuscular, subcutaneous, intraocular, intraarterial, intrathecal, inhalation or intralesional routes, topical or by sustained release systems as noted below. The antibody is typically administered continuously by infusion or by bolus injection. One can administer the antibodies in a local or systemic manner.

[0866] The anti-EGFR antibodies, such as modified antibodies, provided herein can be prepared in a mixture with a pharmaceutically acceptable carrier. Techniques for formulation and administration of the compounds are known to one of skill in the art (see e.g., “Remington's Pharmaceutical Sciences,” Mack Publishing Co., Easton, Pa.). This therapeutic composition can be administered intravenously or through the nose or lung, preferably as a liquid or powder aerosol (lyophilized). The composition also can be administered parenterally or subcutaneously as desired. When administered systematically, the therapeutic composition should be sterile, pyrogen-free and in a parenterally acceptable solution having due regard for pH, isotonicity, and stability. These conditions are known to those skilled in the art. Pharmaceutical compositions suitable for use include compositions wherein one or more anti-EGFR antibodies are contained in an amount effective to achieve their intended purpose. Determination of a therapeutically effective amount is well within the capability of those skilled in the art. Therapeutically effective dosages can be determined by using in vitro and in vivo methods as described herein. Accordingly, an anti-EGFR antibody provided herein, when in a pharmaceutical preparation, can be present in unit dose forms for administration.

[0867] Therapeutic formulations can be administered in many conventional dosage formulations. Briefly, dosage formulations of the antibodies provided herein are prepared for storage or administration by mixing the compound having the desired degree of purity with physiologically acceptable carriers, excipients, or stabilizers. Such materials are non-toxic to the recipients at the dosages and concentrations employed, and can include buffers such as TRIS HCl, phosphate, citrate, acetate and other organic acid salts; antioxidants such as ascorbic acid; low molecular weight (less than about ten residues) peptides such as polyarginine, proteins, such as serum albumin, gelatin, or immunoglobulins; hydrophilic polymers such as polyvinylpyrrolidinone; amino acids such as glycine, glutamic acid, aspartic acid, or arginine; monosaccharides, disaccharides, and other carbohydrates including cellulose or its derivatives, glucose, mannose, or dextrins; chelating agents such as EDTA; sugar alcohols such as mannitol or sorbitol; counterions such as sodium and/or nonionic surfactants such as TWEEN, PLURONICS or polyethylene glycol.

[0868] In particular examples herein, provided herein are pharmaceutical compositions that contain a stabilizing agent. The stabilizing agent can be an amino acid, amino acid derivative, amine, sugar, polyols, salt or surfactant. In some examples, the stable co-formulations contain a single stabilizing agent. In other examples, the stable co-formulations contain 2, 3, 4, 5 or 6 different stabilizing agents.

[0869] For example, the stabilizing agent can be a sugar or polyol, such as a glycerol, sorbitol, mannitol, inositol, sucrose or trehalose. In particular examples, the stabilizing agent is sucrose. In other examples, the stabilizing agent is trehalose. The concentration of the sugar or polyol is from or from about 100 mM to 500 mM, 100 mM to 400 mM, 100 mM to 300 mM, 100 mM to 200 mM, 200 mM to 500 mM, 200 mM to 400 mM, 200 mM to 300 mM, 250 mM to 500 mM, 250 mM to 400 mM, 250 mM to 300 mM, 300 mM to 500 mM, 300 mM to 400 mM, or 400 mM to 500 mM, each inclusive.

[0870] In examples, the stabilizing agent can be a surfactant that is a polypropylene glycol, polyethylene glycol, glycerin, sorbitol, poloxamer and polysorbate. For example, the surfactant can be a polypropylene glycol, polyethylene glycol, glycerin, sorbitol, poloxamer and polysorbate, such as a poloxamer 188, polysorbate 20 and polysorbate 80. In particular examples, the stabilizing agent is polysorbate 80. The concentration of surfactant, as a % of mass concentration (w/v) in the formulation, is between or about between 0.005% to 1.0%, 0.01% to 0.5%, 0.01% to 0.1%, 0.01% to 0.05%, or 0.01% to 0.02%, each inclusive.

[0871] When used for in vivo administration, the modified anti-EGFR antibody formulation should be sterile and can be formulated according to conventional pharmaceutical practice. This is readily accomplished by filtration through sterile filtration membranes, prior to or following lyophilization and reconstitution. The antibody ordinarily will be stored in lyophilized form or in solution. Other vehicles such as naturally occurring vegetable oil like sesame, peanut, or cottonseed oil or a synthetic fatty vehicle like ethyl oleate or the like may be desired. Buffers, preservatives, antioxidants and the like can be incorporated according to accepted pharmaceutical practice.

[0872] The anti-EGFR antibodies, such as modified anti-EGFR antibodies, can be provided at a concentration in the composition of from or from about 0.1 to 10 mg/mL, such as, for example a concentration that is at least or at least about 0.1, 0.2, 0.3, 0.4, 0.5, 0.6, 0.7, 0.8, 0.9, 1.0, 1.5, 2.0, 2.5, 3.0, 3.5, 4.0, 4.5, 5.0, 5.5, 6.0, 6.5, 7.0, 7.5, 8.0, 8.5, 9.0, 9.5, 10 mg/mL or more. The volume of the solution can be at or about 1 to 100 mL, such as, for example, at least or about at least or 0.5, 1, 2, 3, 4, 5, 10, 15, 20, 25, 30, 35, 40, 45, 50, 55, 60, 65, 70, 75, 80, 85, 90, 95, 100 mL or more. In some examples, the anti-EGFR antibodies are supplied in phosphate buffered saline. For example, the anti-EGFR antibodies can be supplied as a 50-mL, single-use vial containing 100 mg of anti-EGFR antibody at a concentration of 2 mg/mL in phosphate buffered saline.

[0873] An anti-EGFR antibody provided herein can be lyophilized for storage and reconstituted in a suitable carrier prior to use. This technique has been shown to be effective with conventional immunoglobulins and protein preparations and art-known lyophilization and reconstitution techniques can be employed.

[0874] An anti-EGFR antibody provided herein can be provided as a controlled release or sustained release composition. Polymeric materials are known in the art for the formulation of pills and capsules which can achieve controlled or sustained release of the antibodies provided herein (see, e.g., Medical Applications of Controlled Release, Langer and Wise (eds.), CRC Pres., Boca Raton, Fla. (1974); Controlled Drug Bioavailability, Drug Product Design and Performance, Smolen and Ball (eds.), Wiley, New York (1984); Langer and Peppas (1983) J. Macromol. Sci. 23:61; see also Levy et al. (1985) Science 228:190; During et al. (1989) Ann. Neurol. 25:351; Howard et al. (1989) J. Neurosurg. 71:105; U.S. Pat. Nos. 5,679,377, 5,916,597, 5,912,015, 5,989,463, 5,128,326; and PCT Publication Nos. WO 99/15154 and WO 99/20253). Examples of polymers used in sustained release formulations include, but are not limited to, poly(2-hydroxy ethyl methacrylate), poly(methyl methacrylate), poly(acrylic acid), poly(ethylene-co-vinyl acetate), poly(methacrylic acid), polyglycolides (PLG), polyanhydrides, poly(N-vinyl pyrrolidone), poly(vinyl alcohol), polyacrylamide, poly(ethylene glycol), polylactides (PLA), poly(lactide-co-glycolides) (PLGA), and polyorthoesters. Generally, the polymer used in a sustained release formulation is inert, free of leachable impurities, stable on storage, sterile, and biodegradable. Any technique known in the art for the production of sustained release formulation can be used to produce a sustained release formulation containing one more anti-EGFR antibodies provided herein.

[0875] In some examples, the pharmaceutical composition contains an anti-EGFR antibody provided herein and one or more additional antibodies. In some examples, the one or more additional antibodies includes, but is not limited to, anti-EGFR antibodies described herein or known in the art, such as, for example, ABX-EGF or cetuximab.

[0876] 2. Articles of Manufacture/Kits

[0877] Pharmaceutical compositions of modified anti-EGFR antibodies or nucleic acids encoding modified anti-EGFR antibodies, or a derivative or a biologically active portion thereof, can be packaged as articles of manufacture containing packaging material, a pharmaceutical composition which is effective for treating a disease or conditions that can be treated by administration of an anti-EGFR antibody, such as the diseases and conditions described herein or known in the art, and a label that indicates that the antibody or nucleic acid molecule is to be used for treating the infection, disease or disorder. The pharmaceutical compositions can be packaged in unit dosage forms containing an amount of the pharmaceutical composition for a single dose or multiple doses. The packaged compositions can contain a lyophilized powder of the pharmaceutical compositions containing the modified anti-EGFR antibodies provided, which can be reconstituted (e.g., with water or saline) prior to administration.

[0878] The articles of manufacture provided herein contain packaging materials. Packaging materials for use in packaging pharmaceutical products are well-known to those of skill in the art (see, e.g., U.S. Pat. Nos. 5,323,907, 5,052,558 and 5,033,252). Examples of pharmaceutical packaging materials include, but are not limited to, blister packs, bottles, tubes, inhalers (e.g., pressurized metered dose inhalers (MDI), dry powder inhalers (DPI), nebulizers (e.g., jet or ultrasonic nebulizers) and other single breath liquid systems), pumps, bags, vials, containers, syringes, bottles, and any packaging material suitable for a selected formulation and intended mode of administration and treatment.

[0879] The modified anti-EGFR antibodies, nucleic acid molecules encoding the antibodies, pharmaceutical compositions, or combinations provided herein also can be provided as kits. Kits can optionally include one or more components such as instructions for use, devices and additional reagents (e.g., sterilized water or saline solutions for dilution of the compositions and/or reconstitution of lyophilized protein), and components, such as tubes, containers and syringes for practice of the methods. Exemplary kits can include the anti-EGFR antibodies provided herein, and can optionally include instructions for use, a device for administering the anti-EGFR antibodies to a subject, a device for detecting the anti-EGFR antibodies in a subject, a device for detecting the anti-EGFR antibodies in samples obtained from a subject, and a device for administering an additional therapeutic agent to a subject.

[0880] The kit can, optionally, include instructions. Instructions typically include a tangible expression describing the modified anti-EGFR antibodies and, optionally, other components included in the kit, and methods for administration, including methods for determining the proper state of the subject, the proper dosage amount, dosing regimens, and the proper administration method for administering the anti-EGFR antibodies. Instructions also can include guidance for monitoring the subject over the duration of the treatment time.

[0881] Kits also can include a pharmaceutical composition described herein and an item for diagnosis. For example, such kits can include an item for measuring the concentration, amount or activity of the selected anti-EGFR antibody in a subject.

[0882] In some examples, the anti-EGFR antibody is provided in a diagnostic kit for the detection of EGFR in an isolated biological sample (e.g., tumor cells, such as circulating tumor cells obtained from a subject or tumor cells excised from a subject). In some examples, the diagnostic kit contains a panel of one or more anti-EGFR antibodies and/or one or more control antibodies (i.e., non-EGFR binding antibodies or EGFR antibodies known in the art, such as cetuximab), where one or more antibodies in the panel is a modified anti-EGFR antibody provided herein.

[0883] Kits provided herein also can include a device for administering the anti-EGFR antibodies to a subject. Any of a variety of devices known in the art for administering medications to a subject can be included in the kits provided herein. Exemplary devices include, but are not limited to, a hypodermic needle, an intravenous needle, and a catheter. Typically the device for administering the modified anti-EGFR antibodies of the kit will be compatible with the desired method of administration of the modified anti-EGFR antibodies.

[0884] 3. Combinations

[0885] Provided are combinations of the modified anti-EGFR antibodies provided herein and a second agent, such as a second anti-EGFR antibody or other therapeutic or diagnostic agent. A combination can include any anti-EGFR antibody or reagent for effecting therapy thereof in accord with the methods provided herein. For example, a combination can include any anti-EGFR antibody and a chemotherapeutic agent. Combinations also can include an anti-EGFR antibody provided herein with one or more additional therapeutic antibodies. For example, the additional therapeutic agent is an anti-cancer agent, such as a chemotherapeutic agent, for example, as described in Section G. Combinations of the modified anti-EGFR antibodies thereof provided also can contain pharmaceutical compositions containing the anti-EGFR antibodies or host cells containing nucleic acids encoding the anti-EGFR antibodies as described herein. The combinations provided herein can be formulated as a single composition or in separate compositions.

### G. THERAPEUTIC USES

[0886] The anti-EGFR antibodies, or fragments thereof, provided herein can be used for any purpose known to the skilled artisan for use of an anti-EGFR antibody. For example, the anti-EGFR antibodies described herein can be used for one or more of therapeutic, diagnostic, industrial and/or research purpose(s). In particular, the methods provided herein include methods for the therapeutic uses of the modified anti-EGFR antibodies provided herein. In some examples, the anti-EGFR antibodies described herein can be used to kill target cells that include EGFR, such as, for example cancer cells. In some examples, the anti-EGFR antibodies can block, antagonize, or agonize EGFR. By virtue of such activity, the anti-EGFR antibodies provided herein, or fragments thereof, can be administered to a patient or subject for treatment of any condition responsive to treatment with an anti-EGFR antibody, including, but not limited to, a tumor, cancer or metastasis. The therapeutic uses include administration of a therapeutically effective amount of an anti-EGFR antibody, alone or in combination with other treatments or agents.

[0887] The anti-EGFR antibodies, such as modified anti-EGFR antibodies and fragments thereof, provided herein, can be used as therapeutics for the treatment of any disease or condition in which existing anti-EGFR antibodies, such as cetuximab, are used. The anti-EGFR antibodies, when administered, result in subjects exhibiting reduced or lessened side effects compared to side effects that can be observed after administration of other anti-EGFR antibodies. Treatment of diseases and conditions with anti-EGFR antibodies, such as modified anti-EGFR antibodies, can be effected by any suitable route of administration using suitable formulations as described herein including, but not limited to, infusion, subcutaneous injection, intramuscular, intradermal, oral, and topical and transdermal administration.

[0888] As discussed elsewhere herein, existing anti-EGFR antibodies, such as Cetuximab, when administered, can result in subjects exhibiting local and systemic side effects, and, in particular, dermal side effects. These side effects limit the therapeutic use. In many cases, these side effects are associated with binding to EGFR at a neutral physiologic pH environment, such as in the skin dermis. The modified anti-EGFR antibodies provided herein, which are more active under conditions that include one or both of low pH ranging from about 5.6 to about 6.8, and in particular 6.0 to 6.5, inclusive, and/or lactate concentration of 15 mM to 20 mM (e.g., 16.6 mM or 16.7 mM) compared to under conditions that contain one or both of neutral pH (e.g., pH about or 7.0 to 7.4, inclusive) and/or normal lactate concentrations of 0.5 mM to 5 mM (e.g., 1 mM), can be administered for the treatment of any disease or condition described herein. By virtue of the activity, the modified anti-EGFR antibodies provided herein can have greater activity in a tumor environment (which can have a low pH and/or increased lactic acid concentrations) than in a neutral physiologic environment that is associated with one or more side effects of an anti-EGFR antibody, such as the skin basal layer. This can be advantageous by targeting therapy only to diseased tissues, such as tumor tissues, in order to reduce or prevent side effects, including local and systemic side effects.

[0889] Hence, the modified anti-EGFR antibodies provided herein that are associated with reduced side effects, such as the modified anti-EGFR antibodies provided herein, can be used at higher dosing regimens, and can have improved efficacy and safety. Side effects that can be reduced compared to those observed by existing anti-EGFR antibody therapeutics, such as Cetuximab, include any undesirable nontherapeutic effect described herein or known in the art, such as nausea, emesis, chest tightness, headache, and related cardiovascular effects such as blood pressure instability and arterial constriction, dermal toxicity, bone marrow suppression, cardiotoxicity, hair loss, renal dysfunctions, stomatitis, anemia, seizures, immune reactions such as acute anaphylaxis, serum sickness, generation of antibodies, infections, cancer, autoimmune disease and cardiotoxicity. In some examples, compared to side effects caused by administration of existing anti-EGFR antibody therapeutics, such as Cetuximab, administration of a modified anti-EGFR antibody provided herein decreases the severity of one or more side effects by at least or about 99%, at least or about 95%, at least or about 90%, at least or about 85%, at least or about 80%, at least or about 75%, at least or about 70%, at least or about 65%, at least or about 60%, at least or about 55%, at least or about 50%, at least or about 45%, at least or about 40%, at least or about 35%, at least or about 30%, at least or about 25%, at least or about 20%, at least or about 15%, or at least or about 10% relative to the severity of the one or more side effects of an unmodified EGFR antibody.

[0890] It is understood that while the anti-EGFR antibodies, such as modified anti-EGFR antibodies, and antibody fragments, provided herein, when administered, can result in subjects exhibiting lessened or reduced side effects compared to other anti-EGFR antibodies, such as Cetuximab, that some side effects can occur upon administration. It is understood that number and degree of tolerable side effects depends upon the condition for which the compounds are administered. For example, certain toxic and undesirable side effects are tolerated when treating life-threatening illnesses that would not be tolerated when treating disorders of lesser consequence. Amounts effective for therapeutic use can depend on the severity of the disease and the weight and general state of the subject as well as the route of administration. Local administration of the therapeutic agent will typically require a smaller dosage than any mode of systemic administration, although the local concentration of the therapeutic agent can, in some cases, be higher following local administration than can be achieved with safety upon systemic administration.

[0891] This section provides exemplary uses of, and administration methods for, the modified anti-EGFR antibodies, provided herein. These described uses are exemplary and do not limit the applications of the antibodies described herein. It is within the skill of a treating physician to identify diseases or conditions which are treatable using an anti-EGFR antibody.

[0892] 1. Exemplary Diseases and Conditions

[0893] The modified anti-EGFR antibodies described herein can be used for any therapeutic purpose for which anti-EGFR antibodies can be used (see, e.g., Reeves et al. (2011) Otolaryngol Head Neck Surg. 144(5):676-84; Adams et al. (2008) Expert Rev Anticancer Ther. 8(8):1237-45; Belda-Iniesta et al. (2006) Cancer Biol Ther. 5(8):912-4; Liu et al. (2010) Cancer Chemother Pharmacol. 65(5):849-61). In some examples, the anti-EGFR antibodies are administered to a patient to treat a disease or disorder that can be treated with an anti-EGFR antibody. In some examples, treatment of the disease includes administration of a modified anti-EGFR antibody described herein after clinical manifestation of the disease to combat the symptoms of the disease. In some examples, administration of a modified anti-EGFR antibody described herein is administered to eradicate the disease. Examples of diseases or disorders that can be treated with the modified anti-EGFR antibodies described herein include autoimmune and inflammatory diseases, infectious diseases, and cancer.

[0894] a. Cancer

[0895] EGFR is associated with cancer development and progression in a variety of human malignancies, such as lung cancer, head and neck cancer, colon cancer, breast cancer, ovarian cancer and glioma. EGFR-related molecular factors, such as copy number and gene mutations, have been identified as prognostic and predictive factors for cancer (see, e.g., Bronte et al. (2011) Front Biosci. 3:879-887; Harding and Burtness (2005) Drugs Today 41(2):107-127). For example, high EGFR expression is associated with poor prognosis in patients with head and neck squamous cell carcinoma (HNSCC) (Szabo et al. (2011) Oral Oncol. 47(6):487-496).

[0896] The modified anti-EGFR antibodies described herein, can bind to and prevent stimulation of the EGF receptor. Due to the pH selective binding, the binding activity is selective to tumor microenvironments that exhibit one or both of acidic pH and elevated lactate concentrations. For example, an altered pH microenvironment is the most common microenvironment found in disease states such as tumor microenvironments, and it is the most uniform within the disease microenvironment compared to other properties such as hypoxia (see e.g., Fogh Andersen et al. (1995) Clin. Chem., 41:1522-1525; Bhujwalla et al. (2002) NMR Biomed., 15:114-119; Helmlinger et al. (1997) Nature Med., 3:177; Gerweck and Seetharaman (1996), Cancer Res. 56(6):1194-1198). For example, in many tumors the ‘Warburg effect’ creates a microenvironment with a pH ranging from about 5.6 to about 6.8, such as less than or about or pH 5.6, 5.7, 5.8, 5.9, 6.0, 6.1, 6.2, 6.3, 6.4, 6.5, 6.6, 6.7, or 6.8. Thus, anti-EGFR antibodies that are more active at acidic pH than at neutral pH, such as the modified anti-EGFR antibodies described herein, can be used to treat EGFR expressing tumors, while minimizing activity in non-target disease cells or tissues.

[0897] In addition, in many tumors, the ‘Warburg effect’ creates a microenvironment with lactate concentrations between 10 to 20 mM. Elevated lactate levels have been found associated with a variety of tumors including, but not limited to, head and neck, metastatic colorectal cancer, cervical cancer and squamous cell carcinoma (see, e.g., Walenta et al., (1997) American Journal of Pathology 150(2): 409-415; Schwickert et al., (1995) Cancer Research 55: 4757-4759; Walenta et al., (2000) Cancer Research 60: 916-921; Guo et al., (2004) J Nucl Med 45: 1334-1339; Mathupala et al., (2007) J Bioenerg Biomembr 39: 73-77; Holroyde et al., (1979) Cancer Research 39: 4900-4904; Schurr and Payne. (2007) Neuroscience 147: 613-619; and Quennet et al., (2006) Radiotherapy and Oncology 81: 130-135). Thus, anti-EGFR antibodies that are more active at increased lactate concentrations than at normal physiologic lactate concentrations, such as the modified anti-EGFR antibodies described herein, can be used to treat EGFR expressing tumors, while minimizing activity at non-target disease cells or tissues.

[0898] The binding of modified anti-EGFR antibodies to EGFR can inhibit the functional activity of the receptor. For example, binding of a modified anti-EGFR antibody to the receptor can inhibit the binding of epidermal growth factor (EGF) and/or result in internalization of the antibody-receptor complex (Harding and Burtness, Drugs Today (Barc)). Thus, anti-EGFR antibodies, such as the modified anti-EGFR antibodies provided herein, can, for example, prevent receptor phosphorylation and activation of the receptor-associated kinase activity, ultimately shutting off receptor-mediated cell signaling.

[0899] Modified anti-EGFR antibodies, and fragments thereof, described herein, can be used to treat tumors, including solid tumors, that express EGFR. EGFR expressing tumors can be sensitive to EGF present in their local microenvironment, and can further be stimulated by tumor produced EGF or Transforming Growth Factor-alpha (TGF-α). The diseases and conditions that can be treated or prevented by administering the provided modified anti-EGFR antibodies include, for example, those in which tumor growth is stimulated through an EGFR paracrine and/or autocrine loop. The treatments described herein can therefore be useful for treating a tumor that is not vascularized, or is not yet substantially vascularized.

[0900] In addition, the modified anti-EGFR antibodies described herein can inhibit tumor-associated angiogenesis. EGFR stimulation of vascular endothelium is associated with vascularization of tumors. Typically, vascular endothelium is stimulated in a paracrine fashion by EGF and/or TGF-α from other sources (e.g., tumor cells). Accordingly, anti-EGFR antibodies, such as the modified anti-EGFR antibodies described herein, can be useful for treating subjects with vascularized tumors or neoplasms.

[0901] Tumors that can be treated include primary tumors and metastatic tumors, as well as refractory tumors. Refractory tumors include tumors that fail to respond or are resistant to treatment with chemotherapeutic agents alone, antibodies alone, radiation alone or combinations thereof. Refractory tumors also encompass tumors that appear to be inhibited by treatment with such agents, but recur up to five years, sometimes up to ten years or longer after treatment is discontinued. The tumors can express EGFR at normal levels or they can overexpress EGFR at levels, for example, that are at least 10, 100, or 1000 times normal levels.

[0902] Examples of tumors that express EGFR and can be treated by the modified anti-EGFR antibodies, and fragments thereof, provided herein include carcinomas, gliomas, sarcomas (including liposarcoma), adenocarcinomas, adenosarcomas, and adenomas. Such tumors can occur in virtually all parts of the body, including, for example, breast, heart, lung, small intestine, colon, spleen, kidney, bladder, head and neck, ovary, prostate, brain, pancreas, skin, bone, bone marrow, blood, thymus, uterus, testicles, cervix or liver.

[0903] Exemplary tumors that can be treated by the modified anti-EGFR antibodies, and fragments thereof, provided herein are those that overexpress EGFR. Some tumors observed to overexpress EGFR that can be treated include, but are not limited to, colorectal and head and neck tumors, especially squamous cell carcinoma of the head and neck, brain tumors such as glioblastomas, and tumors of the lung, breast, pancreas, esophagus, bladder, kidney, ovary, cervix, and prostate.

[0904] Other examples of tumors that can be treated by the anti-EGFR antibodies, and antibody fragments thereof, provided herein include Kaposi's sarcoma, CNS neoplasms, neuroblastomas, capillary hemangioblastomas, meningiomas and cerebral metastases, melanoma, gastrointestinal and renal carcinomas and sarcomas, rhabdomyosarcoma, glioblastoma (such as glioblastoma multiforme) and leiomyosarcoma. Examples of cancer that can express EGFR include, but are not limited to, lymphoma, blastoma, neuroendocrine tumors, mesothelioma, schwannoma, meningioma, melanoma, and leukemia or lymphoid malignancies. Examples of such cancers include hematologic malignancies, such as Hodgkin's lymphoma; non-Hodgkin's lymphomas (Burkitt's lymphoma, small lymphocytic lymphoma/chronic lymphocytic leukemia, mycosis fungoides, mantle cell lymphoma, follicular lymphoma, diffuse large B-cell lymphoma, marginal zone lymphoma, hairy cell leukemia and lymphoplasmacytic leukemia), tumors of lymphocyte precursor cells, including B-cell acute lymphoblastic leukemia/lymphoma, and T-cell acute lymphoblastic leukemia/lymphoma, thymoma, tumors of the mature T and NK cells, including peripheral T-cell leukemias, adult T-cell leukemia/T-cell lymphomas and large granular lymphocytic leukemia, Langerhans cell histocytosis, myeloid neoplasias such as acute myelogenous leukemias, including AML with maturation, AML without differentiation, acute promyelocytic leukemia, acute myelomonocytic leukemia, and acute monocytic leukemias, myelodysplastic syndromes, and chronic myeloproliferative disorders, including chronic myelogenous leukemia; tumors of the central nervous system such as glioma, glioblastoma, neuroblastoma, astrocytoma, medulloblastoma, ependymoma, and retinoblastoma; solid tumors of the head and neck (e.g., nasopharyngeal cancer, salivary gland carcinoma, and esophageal cancer), lung (e.g., small-cell lung cancer, non-small cell lung cancer, adenocarcinoma of the lung and squamous carcinoma of the lung), digestive system (e.g., gastric or stomach cancer including gastrointestinal cancer, cancer of the bile duct or biliary tract, colon cancer, rectal cancer, colorectal cancer, and anal carcinoma), reproductive system (e.g., testicular, penile, or prostate cancer, uterine, vaginal, vulval, cervical, ovarian, and endometrial cancer), skin (e.g., melanoma, basal cell carcinoma, squamous cell cancer, actinic keratosis), liver (e.g., liver cancer, hepatic carcinoma, hepatocellular cancer, and hepatoma), bone (e.g., osteoclastoma, and osteolytic bone cancers) additional tissues and organs (e.g., pancreatic cancer, bladder cancer, kidney or renal cancer, thyroid cancer, breast cancer, cancer of the peritoneum, and Kaposi's sarcoma), and tumors of the vascular system (e.g., angiosarcoma and hemangiopericytoma).

[0905] b. Non-Cancer Hyperproliferative Diseases

[0906] Modified anti-EGFR antibodies, and antibody fragments thereof, provided herein can be used to treat a non-cancer hyperproliferative disease in a subject. EGFR is a critical pathway element in signalling from G-protein-coupled receptors (GPCRs), cytokines, receptor tyrosine kinases and integrins to a variety of cellular responses such as mitogen activated protein kinase activation, gene transcription and proliferation. Ligand binding to EGFR can induce autophosphorylation of cytoplasmic tyrosine residues, which can initiate cellular pathways leading to cellular proliferation. Overexpression and/or overstimulation can result in hyperproliferation. For example, the EGFR vIII mutation causes the EGFR receptor to have a constitutively active kinase function and stimulate cellular proliferation. It is known in the art that anti-EGFR antibodies can treat non-cancer hyperproliferative disorders. For example, Menetrier's disease, a rare premalignant, non-cancerous, hyperproliferative disorder of the stomach, can be treated with cetuximab (Fiske et al. (2009) Sci Trasl. Med. 1(8): 8ra18; Myers et al. (2012)Mol. Cell. Proteomics 11:10.1074/mcp.M111.015222, 1-15).

[0907] Examples of hyperproliferative diseases that can be treated by the anti-EGFR antibodies provided herein include any hyperproliferative diseases that can be treated by administration of an anti-EGFR antibody and include, for example, psoriasis, actinic keratoses, and seborrheic keratoses, warts, keloid scars, and eczema. Also included are hyperproliferative diseases caused by virus infections, such as papilloma virus infection. Different types of psoriasis can display characteristics such as pus-like blisters (pustular psoriasis), severe sloughing of the skin I (erythrodermic psoriasis), drop-like dots (guttae psoriasis) and smooth inflamed lesions (inverse psoriasis). It is understood that treatment of psoriasis includes treatment of all types of psoriasis (e.g., psoriasis vulgaris, psoriasis pustulosa, erythrodermic psoriasis, psoriasis arthropathica, parapsoriasis, palmoplantar pustulosis).

[0908] c. Autoimmune Diseases or Disorders

[0909] Modified anti-EGFR antibodies, and antibody fragments thereof, provided herein can be used to treat autoimmune diseases or disorders. Examples of autoimmune diseases or disorders that can be treated with the anti-EGFR antibodies described herein include, but are not limited to, allogenic islet graft rejection, alopecia areata, ankylosing spondylitis, antiphospholipid syndrome, autoimmune Addison's disease, antineutrophil cytoplasmic autoantibodies (AN CA), autoimmune diseases of the adrenal gland, autoimmune hemolytic anemia, autoimmune hepatitis, autoimmune myocarditis, autoimmune neutropenia, autoimmune oophoritis and orchitis, autoimmune thrombocytopenia, autoimmune urticaria, Behcet's disease, bullous pemphigoid, cardiomyopathy, Castleman's syndrome, celiac spruce-dermatitis, chronic fatigue immune dysfunction syndrome, chronic inflammatory demyelinating polyneuropathy, Churg-Strauss syndrome, cicatricial pemphigoid, CREST syndrome, cold agglutinin disease, Crohn's disease, dermatomyositis, discoid lupus, essential mixed cryoglobulinemia, factor VIII deficiency, fibromyalgia-fibromyositis, glomerulonephritis, Grave's disease, Guillain-Barre, Goodpasture's syndrome, graft-versus-host disease (GVHD), Hashimoto's thyroiditis, hemophilia A, idiopathic pulmonary fibrosis, idiopathic thrombocytopenia purpura (ITP), IgA neuropathy, IgM polyneuropathies, immune mediated thrombocytopenia, juvenile arthritis, Kawasaki's disease, lichen planus, lupus erythematosus, Meniere's disease, mixed connective tissue disease, multiple sclerosis, type 1 diabetes mellitus, myasthenia gravis, pemphigus vulgaris, pernicious anemia, polyarteritis nodosa, polychondritis, polyglandular syndromes, polymyalgia rheumatica, polymyositis and dermatomyositis, primary agammaglobulinemia, primary biliary cirrhosis, psoriasis, psoriatic arthritis, Reynaud's phenomenon, Reiter's syndrome, rheumatoid arthritis, sarcoidosis, scleroderma, Sjögren's syndrome, solid organ transplant rejection, stiff-man syndrome, systemic lupus erythematosus, Takayasu arteritis, temporal arteritis/giant cell arteritis, thrombotic thrombocytopenia purpura, ulcerative colitis, uveitis, vasculitides such as dermatitis herpetiformis vasculitis, vitiligo, and Wegner's granulomatosis.

[0910] d. Inflammatory Disorders

[0911] Modified anti-EGFR antibodies, and antibody fragments thereof, provided herein can be used to treat inflammatory diseases or disorders. Inflammatory disorders that can be treated by the modified anti-EGFR antibodies provided herein include but are not limited to acute respiratory distress syndrome (ARDS), acute septic arthritis, allergic encephalomyelitis, allergic rhinitis, allergic vasculitis, allergy, asthma, atherosclerosis, chronic inflammation due to chronic bacterial or viral infections, chronic obstructive pulmonary disease (COPD), coronary artery disease, encephalitis, inflammatory bowel disease, inflammatory osteolysis, inflammation associated with acute and delayed hypersensitivity reactions, inflammation associated with tumors, peripheral nerve injury or demyelinating diseases, inflammation associated with tissue trauma such as burns and ischemia, inflammation due to meningitis, multiple organ injury syndrome, pulmonary fibrosis, sepsis and septic shock, Stevens-Johnson syndrome, undifferentiated arthropathy, and undifferentiated spondyloarthropathy.

[0912] e. Infectious Diseases

[0913] Modified anti-EGFR antibodies, and antibody fragments thereof, provided herein can be used to treat infectious diseases. Infectious diseases that can be treated by the anti-EGFR antibodies described herein include but are not limited to diseases caused by pathogens such as viruses, bacteria, fungi, protozoa, and parasites. Infectious diseases can be caused by viruses including adenovirus, cytomegalovirus, dengue, Epstein-Barr, hanta, hepatitis A, hepatitis B, hepatitis C, herpes simplex type I, herpes simplex type II, human immunodeficiency virus, (HIV), human papilloma virus (HPV), influenza, measles, mumps, papova virus, polio, respiratory syncytial virus, rinderpest, rhinovirus, rotavirus, rubella, SARS virus, smallpox and viral meningitis. Infectious diseases can also be caused by bacteria including Bacillus anthracia, Borrelia burgdorferi, Campylobacter jejuni, Chlamydia trachomatis, Clostridium botulinum, Clostridium tetani, Diphtheria, E. coli, Legionella, Helicobacter pylori, Mycobacterium rickettsia, Mycoplasma Neisseria, Pertussis, Pseudomonas aeruginosa, S. pneumonia, Streptococcus, Staphylococcus, Vibrio cholerae and Yersinia pestis. Infectious diseases can also be caused by fungi such as Aspergillus fumigatus, Blastomyces dermatitidis, Candida albicans, Coccidioides immitis, Cryptococcus neoformans, Histoplasma capsulatum and Penicillium marneffei. Infectious diseases can also be caused by protozoa and parasites such as chlamydia, kokzidiose, leishmania, malaria, rickettsia, and trypanosoma.

[0914] f. Other Diseases and Conditions

[0915] Modified anti-EGFR antibodies, and antibody fragments thereof, provided herein can be used to treat other diseases and conditions associated with expression of EGFR and/or for which exiting anti-EGFR antibodies, such as Cetuximab, are known to treat. Other diseases and conditions that can be treated by the anti-EGFR antibodies described herein include but are not limited to heart conditions such as congestive heart failure (CHF), myocarditis and other conditions of the myocardium; skin conditions such as rosacea, acne, and eczema; bone and tooth conditions such as bone loss, osteoporosis, Paget's disease, Langerhans' cell histiocytosis, periodontal disease, disuse osteopenia, osteomalacia, monostotic fibrous dysplasia, polyostotic fibrous dysplasia, bone metastasis, bone pain management, humoral malignant hypercalcemia, periodontal reconstruction, spinal cord injury, and bone fractures; metabolic conditions such as Gaucher's disease; endocrine conditions such as Cushing's syndrome; and neurological conditions.

[0916] 2. Subjects for Therapy

[0917] A subject or candidate for therapy with a modified anti-EGFR antibody provided herein includes, but is not limited to, a subject, such as a human patient, that has a disease or condition that can be treated by administration of an anti-EGFR antibody, such as diseases or conditions described herein or known in the art.

[0918] a. Selection of Subjects Overexpressing EGFR

[0919] In some examples, subjects or candidates for therapy are tested for evidence of positive EGFR expression using methods known in the art, such as for example Western blotting (WB) of membrane-bound protein and/or total homogenates, and immunohistochemistry (IHC) on tissue microarrays. In addition, phosphorylated EGFR (pEGFR) can be measured by Western blot (see, e.g., Thariat et al. (2012) Clin. Cancer Res. 18:1313). EGFR assessment can be evaluated using, for example, the EGFR PHARMDX scoring guidelines (Dako, Glostrup, Denmark). EGFR expression can be evaluated on sections that include the deepest region of tumor invasion, which can contain the greatest density of EGFR-positive cells. Such methods are within the ability of the skilled artisan (see, e.g., Ervin-Haynes et al. (2006) J. Clin. Oncol. ASCO Annual Meeting Proceedings Part I. Vol. 24, No. 18S (June 20 Supplement)13000; Goldstein and Armin (2001) Cancer 92(5):1331-1346; Bibeau et al. (2006) Virchows Arch. 449(3):281-287).

[0920] b. Selection of Subjects Exhibiting EGFR-Associated Polymorphism

[0921] In some examples, subjects or candidates for therapy are screened for one or more polymorphisms in order to predict the efficacy of the anti-EGFR antibodies provided herein. A number of the receptors that can interact with anti-EGFR antibodies, such as the modified

[0922] EGFR antibodies provided herein, are polymorphic in the human population. For a given patient or population of patients, the efficacy of the modified anti-EGFR antibodies provided herein can be affected by the presence or absence of specific polymorphisms in proteins.

[0923] For example, FcγRIIIa is polymorphic at position 158, which is commonly either V (high affinity) or F (low affinity). Patients with the V/V homozygous genotype mount a stronger natural killer (NK) response and are observed to have a better clinical response to treatment with the anti-CD20 antibody Rituxan® (rituximab), (Dall'Ozzo et. al. (2004) Cancer Res. 64:4664-4669). Additional polymorphisms include but are not limited to FcγRIIa R131 or H131, and such polymorphisms are known to either increase or decrease Fc binding and subsequent biological activity, depending on the polymorphism.

[0924] In some examples, subjects or candidates for therapy are screened for one or more polymorphisms in order to predict the efficacy of the anti-EGFR antibodies provided herein. Such methods are within the ability of the skilled artisan. This information can be used, for example, to select patients to include or exclude from clinical trials or, post-approval, to provide guidance to physicians and patients regarding appropriate dosages and treatment options. For example, in patients that are homozygous or heterozygous for FcγRIIIa 158F antibody drugs, such as the anti-CD20 mAb Rituximab, can have decreased efficacy (Carton 2002 Blood 99: 754-758; Weng 2003 J. Clin. Oncol. 21:3940-3947); such patients can show a much better clinical response to the modified anti-EGFR antibodies provided herein.

[0925] c. Identifying Subjects Exhibiting Anti-EGFR-Associated Side Effects

[0926] In some examples, a subject or candidate for therapy with a modified anti-EGFR antibody provided herein, includes, but is not limited to, a subject, such as a human patient, that has experienced one more side effects resulting from administration of an anti-EGFR antibody, such as any anti-EGFR antibody known in the art. Administration of an anti-EGFR provided herein to the subject in place of the anti-EGFR antibody therapy that caused the side effect(s) can result in comparable or improved therapeutic efficacy, while resulting in reduced or lessened side effect(s).

[0927] The dosage regimen, including dosage amount and frequency of administration, of the anti-EGFR provided herein can be the same or different than the previous anti-EGFR antibody therapy. In some cases, the dosage amount can be increased or decreased. It is within the skill of the practicing physician to determine the dosage regimen based on factors such as the particular subject being treated, the nature of the disease or condition, the nature of the existing symptoms or side effects and the particular modified anti-EGFR antibody provided herein that is to be administered.

[0928] As discussed elsewhere herein, EGFR is expressed in many normal human tissues (Lacouture, and Melosky (2007) Skin Therapy Lett. 12, 1-5). Therefore, administration of many therapeutic anti-EGFR antibodies, such as Cetuximab, can result in undesirable reactions. Such side effects are well-known to one of skill in the art and can be assessed or identified. Methods to identify side effects caused by an anti-EGFR antibody therapeutic include any methods described herein, such as patient interview, patient examination and blood tests. Side effects that can be assessed include any side effects that are known to one of skill in the art to be associated with administration of an anti-EGFR antibody, including any side effects described herein, such as, for example, a side effect associated with administration of Cetuximab.

[0929] For example, side effects of Cetuximab include any described herein and/or known to one of skill in the art, including symptomatic hypomagnesemia, paronychia, fever, dermatologic toxicity, papulopustular rash of the face and upper trunk, hair growth abnormalities, loss of scalp hair, increased growth of facial hair and eyelashes, dry and itchy skin, and periungual inflammation with tenderness (Eng (2009) Nat. Rev. 6:207-218; Schrag et al. (2005) J. Natl. Cancer Inst. 97(16):1221-1224; Lacouture and Melosky (2007) Skin Therapy Lett. 12:1-5). In some examples, the side effects of Cetuximab include dermatological toxicities, including papulopustular eruption, dry skin, pruritus, ocular and nail changes, acneiform skin reaction, acneiform rash, acneiform follicular rash, acne-like rash, maculopapular skin rash, monomorphic pustular lesions, papulopustular reaction (Lacouture and Melosky (2007) Skin Therapy Lett. 12:1-5).

[0930] The side effects can be triggered by external events and/or can develop over time. For example, skin rashes can be triggered by sun exposure and can develop in stages, such as sensory disturbance, erythema, and edema (for example, week 1); papulopustular eruption (for example, week 2); and crusting (for example, week 4). If the rash is treated successfully, erythema and dry skin can be seen in areas previously affected by the papulopustular eruption (for example, weeks 4-6). Other dermatological toxicities that can be associated with administration of an anti-EGFR antibody, such as Cetuximab include pruritus, erythema and paronychial inflammation (Lacouture, and Melosky (2007) Skin Therapy Lett. 12, 1-5). For example, Cetuximab elicits an immune response in about 5% of patients. Such an immune response can result in an immune complex-mediated clearance of the antibodies or fragments from the circulation, and make repeated administration unsuitable for therapy, thereby reducing the therapeutic benefit to the patient and limiting the re-administration of the antibody.

[0931] In some examples, the severity of side effects can be evaluated according to the National Cancer Institute Common Terminology Criteria for Adverse Events (CTCAE) v4.0, which sets forth criteria for grading the severity for side effects. The CTCAE includes Grades 1 through 5 that set forth unique clinical descriptions of severity for each adverse effect. Under the general guidelines of the CTCAE, Grade 1 adverse events are mild, asymptomatic or mild symptoms, clinical or diagnostic observations only; and intervention is not indicated. Grade 2 adverse events are moderate, minimal, local or noninvasive intervention indicated, limiting age-appropriate instrumental Activities of Daily Living (ADL). Grade 3 adverse events are severe or medically significant but not immediately life-threatening, with hospitalization or prolongation of hospitalization indicated, disabling and limiting self-care ADL. Grade 4 adverse events are life-threatening consequences, and urgent intervention is indicated. Grade 5 adverse events are classified as death related to the adverse event(s). Thus, for example, administering an anti-EGFR antibody provided herein in a subject identified as having a particular grade of side effects can result in a reduction of side effects is characterized by a reduction in the grade of the side effect as classified under the CTCAE v4.0. In some examples, reduction of side effects is characterized by a reduction in the severity of the symptoms associated with the side effect, including any symptoms described herein or known to one of skill in the art.

[0932] Other methods to identify patients that exhibit a side effect of an anti-EGFR antibody are known to one of skill in the art, and include quality-of-life questionnaires (e.g., Jonker et al. (2007) N. Engl. J. Med. 357:2040-2048). Examples of side effects of anti-EGFR antibodies, and methods known to the skilled artisan to identify the severity of side effects, are described below. These side effects are exemplary and not meant to be limiting. It is understood that any side effects known in the art or described herein that are associated with administration of an anti-EGFR antibody, such as Cetuximab, can be identified in a subject, whereby the subject can then be treated with a modified anti-EGFR antibody, provided herein so that such side effects are not further exacerbated and/or are reduced.

### i. Skin Toxicities

[0933] In human skin, EGFR is expressed in basal keratinocytes and can stimulate epidermal growth, inhibit differentiation, and accelerate wound healing (Lacouture, and Melosky (2007) Skin Therapy Lett. 12:1-5; Nanney et al. (1996) J. Invest. Dermatol 94(6):742-748). Therefore anti-EGFR antibodies that interact with and inhibit EGFR expressed by basal keratinocytes can impair growth and migration of keratinocytes, and result in inflammatory chemokine expression. These effects can lead to inflammatory cell recruitment and subsequent cutaneous injury, which can result in side effects, such as side effects described herein. The pH of the skin basal layer environment is neutral (e.g., at or about pH 7.0-7.4). Therefore, modified anti-EGFR antibodies, that have increased activity at low pH than at neutral pH, such as the anti-EGFR antibodies provided herein, can have decreased skin toxicity and decreased side effects. Examples of side effects resulting from EGFR inhibition in the skin, and methods of identification and classification thereof, are described below.

[0934] Papulopustular rash and acneiform rash, which are characterized by an eruption consisting of papules (a small, raised pimple) and pustules (a small pus filled blister), typically appearing in face, scalp, and upper chest and back. Unlike acne, papulopustular rash does not present with whiteheads or blackheads, and can be symptomatic, with itchy or tender lesions (CTCAE v. 4.03, U.S. Department of Health and Human Services, published Jun. 14, 2010). Papulopustular rash and acneiform rash can be identified and classified by examination of the patient and/or by clinical interview. Grade 1 papulopustular rash or acneiform rash is classified as papules and/or pustules covering <10% Body Surface Area (BSA), which can be associated with symptoms of pruritus or tenderness. Grade 2 papulopustular rash or acneiform rash is classified as papules and/or pustules covering 10-30% BSA, which can be associated with symptoms of pruritus or tenderness; associated with psychosocial impact; limiting instrumental activities of daily living (ADL). Grade 3 papulopustular rash or acneiform rash is classified as papules and/or pustules covering >30% BSA, which can be associated with symptoms of pruritus or tenderness; limiting self-care ADL; and can be associated with local superinfection with oral antibiotics indicated. Grade 4 papulopustular rash or acneiform rash is classified as papules and/or pustules covering any percent BSA, which can be associated with symptoms of pruritus or tenderness and are associated with extensive superinfection with IV antibiotics indicated; and life-threatening consequences. Grade 5 papulopustular rash or acneiform rash is classified as resulting in death (CTCAE v. 4.03, U.S. Department of Health and Human Services, published Jun. 14, 2010; Schrag J. Natl. Cancer. Inst. 97(16):1221-1224).

[0935] An example of a side effect of an anti-EGFR antibody, such as Cetuximab, is dry skin, which is a disorder characterized by flaky and dull skin; fine pores, and papery thin skin texture. Dry skin can be identified and classified by examination of the patient and/or by clinical interview. Grade 1 dry skin is classified as covering <10% BSA and no associated erythema or pruritus. Grade 2 dry skin is classified as covering 10%-30% BSA, associated with erythema or pruritus and limiting instrumental ADL. Grade 3 dry skin is classified as covering >30% BSA, associated with pruritus and limiting self-care ADL (CTCAE v. 4.03, U.S. Department of Health and Human Services, published Jun. 14, 2010; Schrag J. Natl. Cancer. Inst. 97(16):1221-1224).

[0936] Skin hyperpigmentation is a side effect characterized by darkening of the skin due to excessive melanin deposition. Skin hyperpigmentation can be identified and classified by examination of the patient and/or by clinical interview. Grade 1 skin hyperpigmentation is classified as hyperpigmentation covering <10% BSA, no psychosocial impact. Grade 2 skin hyperpigmentation is classified as hyperpigmentation covering >10% BSA, and associated with psychosocial impact. (CTCAE v. 4.03, U.S. Department of Health and Human Services, published Jun. 14, 2010; Schrag J. Natl. Cancer. Inst. 97(16):1221-1224).

[0937] Pruritus is a side effect characterized by an intense itching sensation. Pruritus can be evaluated by patient examination and/or clinical interview. Grade 1 pruritus is classified as mild or localized itching, and topical intervention is indicated. Symptoms of grade 2 pruritus include intense or widespread itching, intermittent itching, skin changes from scratching (e.g., edema, papulation, excoriations, lichenification, oozing/crusts), limiting instrumental ADL, and oral intervention can be indicated. Symptoms of grade 3 pruritus include intense, widespread and/or constant itching, limiting self-care ADL or sleep, and oral corticosteroid or immunosuppressive therapy can be indicated (CTCAE v. 4.03, U.S. Department of Health and Human Services, published Jun. 14, 2010; Schrag J. Natl. Cancer. Inst. 97(16):1221-1224).

[0938] Paronychia is a side effect characterized by an infectious process involving the soft tissues around the nail. Paronychia can be evaluated by patient examination and/or clinical interview. Grade 1 paronychia is classified as including symptoms of nail fold edema or erythema and disruption of the cuticle. Symptoms of grade 2 paronychia can include localized intervention indicated, oral intervention indicated (e.g., antibiotic, antifungal, antiviral), nail fold edema or erythema with pain, discharge or nail plate separation and limiting instrumental ADL. Symptoms of grade 3 paronychia can include limiting self-care ADL, with surgical intervention or IV antibiotics indicated.

### ii. Hypomagnesemia

[0939] EGFR is highly expressed in the kidney, particularly in the ascending limb of the loop of Henle where 70% of filtered magnesium is reabsorbed. Therefore, antibodies that interact with EGFR can interfere with magnesium transport. Hypomagnesemia, a low concentration of magnesium in the blood, can be a side effect of administration of an anti-EGFR antibody. In one study, five percent of patients receiving cetuximab therapy exhibited grade 3 or 4 hypomagnesemia.

[0940] The loop of Henle has a neutral pH (e.g., pH 6.9-7.4) (Dieleman et al. (2001) J. Acquir Immune Defic Syndr. 28(1):9-13; Dantzler et al. (2000) Pflugers Arch. 440(1):140-148.). Therefore, modified anti-EGFR antibodies that have increased activity at low pH than at neutral pH, such as the modified anti-EGFR antibodies provided herein, can have decreased hypomagnesemia.

[0941] Hypomagnesemia can be diagnosed and/or assessed by measurement of serum magnesium levels. For example, the CTCAE classifies Grade 1 hypomagnesemia as a serum magnesium concentration of <Lower Limit of Normal (LLN)—1.2 mg/dL; Grade 2 hypomagnesemia as 1.2-0.9 mg/dL serum magnesium; Grade 3 hypomagnesemia as <0.9-0.7 mg/dL serum magnesium, Grade 4 hypomagnesemia as <0.7 mg/dL serum magnesium and can be accompanied by life-threatening consequences and Grade 5 hypomagnesemia results in death. In addition, symptoms of hypomagnesemia are known to the skilled artisan and include fatigue, paresthesias and hypocalcemia. (CTCAE v. 4.03, U.S. Department of Health and Human Services, published Jun. 14, 2010; Schrag J. Natl. Cancer. Inst. 97(16):1221-1224).

[0942] d. Other Methods of Selecting or Identifying Subjects for Treatment

[0943] Other methods of screening candidates for therapy known in the art are contemplated. For example, Kirsten rat sarcoma viral oncogene homolog (KRAS) mutation status has recently been shown to be predictive of response to cetuximab therapy in colorectal cancer (Van Cutsem et al. (2008) J. Clin. Oncol 26 (May 20 suppl): Abstract 2). KRAS is a GTPase with a role in a number of signal transduction pathways. Mutations in the gene which encodes KRAS, present in over 25% of colorectal cancers, is predictive of the success of EGFR-inhibiting drugs. Expression of the mutated KRAS gene results in a diminished response to EGFR-inhibitor therapy. KRAS mutations can be detected by commercially available laboratory diagnostics.

[0944] 3. Dosages

[0945] A therapeutically effective amount of an anti-EGFR antibody or antibody fragment can be administered for treatment of any of the diseases or conditions provided herein or known to the skilled artisan. Such dosages can be empirically determined by one of skill in the art, such as the treating physician. In some examples, the administered dosages are based on reference to dosage amounts of known anti-EGFR antibodies, such as Cetuximab, for a particular disease or condition. The therapeutically effective concentration of a modified anti-EGFR antibody, provided herein can be determined empirically by testing the anti-EGFR antibodies in known in vitro and in vivo systems such as by using the assays provided herein or known in the art.

[0946] An effective amount of anti-EGFR antibody to be administered therapeutically will depend, for example, upon the therapeutic objectives, the route of administration, and the condition of the patient. In addition, the attending physician can take into consideration various factors known to modify the action of drugs, including severity and type of disease, patient's health, body weight, sex, diet, time and route of administration, other medications and other relevant clinical factors. In addition, the therapist can consider the incidence and severity of side effects, such as side effects described herein or known in the art. Accordingly, the therapist can titer the dosage of the antibody or antigen-binding fragment thereof and modify the route of administration as required to obtain the optimal therapeutic effect and minimize undesirable side effects. The clinician can administer the antibody until a dosage is reached that achieves the desired effect. The progress of this therapy can be monitored by conventional assays described herein or known in the art. The dose of the modified anti-EGFR antibody can be varied to identify the optimal or minimal dose required to achieve activity while reducing or eliminating side effects.

[0947] Generally, the dosage ranges for the administration of the modified anti-EGFR antibodies provided herein are those large enough to produce the desired therapeutic effect in which the symptom(s) of the condition responsive to treatment with an anti-EGFR antibody are ameliorated. Generally, the dosage will vary with the age, condition, sex and the extent of the disease in the patient and can be determined by one of skill in the art. In some examples, the dosage is not so large as to cause adverse side effects. The dosage can be adjusted by the individual physician in the event of the appearance of any adverse side effect.

[0948] Exemplary dosages include, but are not limited to, about or 0.1 mg/kg to 100 mg/kg, such as at least about or about 0.1 mg/kg, about or 0.15 mg/kg, about or 0.2 mg/kg, about or 0.25 mg/kg, about or 0.30 mg/kg, about or 0.35 mg/kg, about or 0.40 mg/kg, about or 0.45 mg/kg, about or 0.5 mg/kg, about or 0.55 mg·kg, about or 0.6 mg/kg, about or 0.7 mg/kg, about or 0.8 mg/kg, about or 0.9 mg/kg, about or 1.0 mg/kg, about or 1.1 mg/kg, about or 1.2 mg/kg, about or 1.3 mg/kg, about or 1.4 mg/kg, about or 1.5 mg/kg, about or 1.6 mg/kg, about or 1.7 mg/kg, about or 1.8 mg/kg, about or 1.9 mg/kg, about or 2 mg/kg, about or 2.5 mg/kg, about or 3 mg/kg, about or 3.5 mg/kg, about or 4 mg/kg, about or 4.5 mg/kg, about or 5 mg/kg, about or 5.5 mg/kg, about or 6 mg/kg, about or 6.5 mg/kg, about or 7 mg/kg, about or 7.5 mg/kg, about or 8 mg/kg, about or 8.5 mg/kg, about or 9 mg/kg, about or 9.5 mg/kg, about or 10 mg/kg, about or 11 mg/kg, about or 12 mg/kg, about or 13 mg/kg, about or 14 mg/kg, about or 15 mg/kg, about or 16 mg/kg, about or 17 mg/kg, about or 18 mg/kg, about or 19 mg/kg, about or 20 mg/kg, about or 21 mg/kg, about or 22 mg/kg, about or 23 mg/kg, about or 24 mg/kg, about or 25 mg/kg, about or 30 mg/kg, about or 40 mg/kg, about or 50 mg/kg, about or 60 mg/kg, about or 70 mg/kg, about or 80 mg/kg, about or 90 mg/kg, about or 100 mg/kg or more.

[0949] In some examples, exemplary dosages include, but are not limited to, about or 0.01 mg/m² to about or 800 mg/m², such as for example, at least about or about or 0.01 mg/m², about or 0.1 mg/m², about or 0.5 mg/m², about or 1 mg/m², about or 5 mg/m², about or 10 mg/m², about or 15 mg/m², about or 20 mg/m², about or 25 mg/m², about or 30 mg/m², about or 35 mg/m², about or 40 mg/m², about or 45 mg/m², about or 50 mg/m², about or 100 mg/m², about or 150 mg/m², about or 200 mg/m², about or 250 mg/m², about or 300 mg/m², about or 400 mg/m², about or 500 mg/m², about or 600 mg/m² and about or 700 mg/m². It is understood that one of skill in the art can recognize and convert dosages between units of mg/kg and mg/m² (see, e.g., Michael J. Derelanko, TOXICOLOGIST'S POCKET HANDBOOK, CRC Press, p. 16 (2000)).

[0950] For treatment of a disease or condition, the dosage of the anti-EGFR antibodies can vary depending on the type and severity of the disease. The anti-EGFR antibodies can be administered in a single dose, in multiple separate administrations, or by continuous infusion. For repeated administrations over several days or longer, depending on the condition, the treatment can be repeated until a desired suppression of disease symptoms occurs or the desired improvement in the patient's condition is achieved. Repeated administrations can include increased or decreased amounts of the anti-EGFR antibody depending on the progress of the treatment. For example, an initial loading dose can be larger than a maintenance dose. In some examples, the initial loading dose is 400 mg/m², and the maintenance dose is 250 mg/m².

[0951] Other dosage regimens also are contemplated. For example, the dosage regimen can be varied. Modified anti-EGFR antibodies that are associated with reduced side effects can be used at higher dosing regimens. In addition, anti-EGFR antibodies that have increased activity in diseased tissues can be used at lower dosing regimens. Methods of determining efficacy of the administered modified anti-EGFR antibodies described herein, are known to one of skill in the art and exemplary methods are described herein, and can be utilized to empirically determine an appropriate dosage regimen. The optimal quantity and spacing of individual dosages of an anti-EGFR antibody of the disclosure will be determined by the nature and extent of the condition being treated, the form, the route and site of administration, and the age and condition of the particular subject being treated, and a physician can determine appropriate dosages to be used. This dosage can be repeated as often as appropriate. If side effects develop, the amount and/or frequency of the dosage can be altered or reduced, in accordance with normal clinical practice. Such studies and practices are within the level of one of skill in the art.

[0952] In some examples, the anti-EGFR antibodies are administered one time, two times, three times, four times, five times, six times, seven times, eight times, nine times, ten times or more per day or over several days. In some examples, the anti-EGFR antibodies are administered in a sequence of two or more administrations, where the administrations are separated by a selected time period. In some examples, the selected time period is at least or about 1 day, 2 days, 3 days, 4 days, 5 days, 6 days, 1 week, 2 weeks, 3 weeks, 1 month, 2 months, or 3 months.

[0953] Side effects of a particular dosage or dosage regimen also can be assessed, for example, by any methods described herein or known in the art, following administration of one or more doses of the anti-EGFR antibody thereof. Dosage amounts and/or frequency of administration can be modified depending on the type and severity of the side effect(s).

[0954] As will be understood by one of skill in the art, the optimal treatment regimen will vary and it is within the scope of the treatment methods to evaluate the status of the disease under treatment and the general health of the patient prior to, and following one or more cycles of therapy in order to determine the optimal therapeutic dosage and frequency of administration. It is to be further understood that for any particular subject, specific dosage regimens can be adjusted over time according to the individual need and the professional judgment of the person administering or supervising the administration of the pharmaceutical formulations, and that the dosages set forth herein are exemplary only and are not intended to limit the scope thereof. The amount of an anti-EGFR antibody to be administered for the treatment of a disease or condition, such as a disease or condition described herein, can be determined by standard clinical techniques described herein or known in the art. In addition, in vitro assays and animal models can be employed to help identify optimal dosage ranges. Such assays can provide dosages ranges that can be extrapolated to administration to subjects, such as humans. Methods of identifying optimal dosage ranges based on animal models are well-known by those of skill in the art, and examples are described herein.

[0955] 4. Routes of Administration

[0956] The anti-EGFR antibodies provided herein can be administered to a subject by any method known in the art for the administration of polypeptides, including for example systemic or local administration. The anti-EGFR antibodies can be administered by routes, such as parenteral (e.g., intradermal, intramuscular, intraperitoneal, intravenous, subcutaneous, or intracavity), topical, epidural, or mucosal (e.g., intranasal, oral, vaginally, vulvovaginal, esophageal, oroesophageal, bronchial, or pulmonary). The anti-EGFR antibodies can be administered externally to a subject, at the site of the disease for exertion of local or transdermal action. Compositions containing anti-EGFR antibodies or antigen-binding fragments can be administered by any convenient route, for example by infusion or bolus injection, by absorption through epithelial or mucocutaneous linings (e.g., oral mucosa, vaginal, rectal and intestinal mucosa). Compositions containing anti-EGFR antibodies or antigen-binding fragments can be administered together with other biologically active agents. In particular examples, the anti-EGFR antibodies are administered by infusion delivery, such as by infusion pump or syringe pump, and can be administered in combination with another therapeutic agent or as a monotherapy.

[0957] The method and/or route of administration can be altered to alleviate adverse side effects associated with administration of an anti-EGFR antibody provided herein. For example, if a patient experiences a mild or moderate (i.e., Grade 1 or 2) infusion reaction, the infusion rate can be reduced (e.g., reduced by 10%, 20%, 30%, 40%, 50%, 60%, 70%, 80%, 90% or more). If the patient experiences severe (i.e., Grade 3 or 4) infusion reactions, the infusion can be temporarily or permanently discontinued.

[0958] In some examples, if the subject experiences an adverse side effect, such as severe skin toxicity, for example severe acneform rash, treatment adjustments can be made. For example, after the occurrence of an adverse side effect, administration can be delayed, such as for 1 to 2 weeks or until the adverse side effect improves. In some examples, after additional occurrences of an adverse side effect, the dosage can be reduced. For example, if the dose is 250 mg/m², after the second occurrence of an adverse side effect, administration of the anti-EGFR antibody can be delayed for 1 to 2 weeks. If the side effect improves, administration of the anti-EGFR antibody can continue with the dose reduced to 250 mg/m². After the third occurrence of the side effect, administration of the anti-EGFR antibody can be delayed for 1 to 2 weeks. If the side effect improves, administration of the anti-EGFR antibody can continue with the dose reduced to 150 mg/m². After several occurrences of an adverse side effect, administration of the anti-EGFR antibody can be discontinued. In patients with mild or moderate skin toxicity, the skilled artisan can continue administration without dose modification. Such determinations are within the ability of the skilled artisan.

[0959] Appropriate methods for delivery, can be selected by one of skill in the art based on the properties of the dosage amount of the anti-EGFR antibody or the pharmaceutical composition containing the antibody or antigen-binding fragment thereof. Such properties include, but are not limited to, solubility, hygroscopicity, crystallization properties, melting point, density, viscosity, flow, stability and degradation profile.

[0960] 5. Combination Therapies

[0961] The modified anti-EGFR antibodies provided herein can be administered before, after, or concomitantly with one or more other therapeutic regimens or agents. The skilled medical practitioner can determine empirically, or by considering the pharmacokinetics and modes of action of the agents, the appropriate dose or doses of each therapeutic regimen or agent, as well as the appropriate timings and methods of administration. The additional therapeutic regimens or agents can improve the efficacy or safety of the anti-EGFR antibody. In some examples, the additional therapeutic regimens or agents can treat the same disease or a comorbidity rather than to alter the action of the anti-EGFR antibody. In some examples, the additional therapeutic regimens or agents can ameliorate, reduce or eliminate one or more side effects known in the art or described herein that are associated with administration of an anti-EGFR antibody.

[0962] For example, an anti-EGFR antibody described herein can be administered with chemotherapy, radiation therapy, or both chemotherapy and radiation therapy. The modified anti-EGFR antibodies can be administered in combination with one or more other prophylactic or therapeutic agents, including but not limited to antibodies, cytotoxic agents, chemotherapeutic agents, cytokines, growth inhibitory agents, anti-hormonal agents, kinase inhibitors, anti-angiogenic agents, cardioprotectants, immunostimulatory agents, immunosuppressive agents, agents that promote proliferation of hematological cells, angiogenesis inhibitors, protein tyrosine kinase (PTK) inhibitors, additional anti-EGFR antibodies, FcγRIIb or other Fc receptor inhibitors, or other therapeutic agents.

[0963] The one or more additional agents can be administered simultaneously, sequentially or intermittently with the anti-EGFR antibody thereof. The agents can be co-administered with the anti-EGFR antibody thereof, for example, as part of the same pharmaceutical composition or same method of delivery. In some examples, the agents can be co-administered with the anti-EGFR antibody at the same time as the modified anti-EGFR antibody thereof, but by a different means of delivery. The agents also can be administered at a different time than administration of the anti-EGFR antibody thereof, but close enough in time to the administration of the anti-EGFR antibody to have a combined prophylactic or therapeutic effect. In some examples, the one or more additional agents are administered subsequent to or prior to the administration of the anti-EGFR antibody separated by a selected time period. In some examples, the time period is 1 day, 2 days, 3 days, 4 days, 5 days, 6 days, 1 week, 2 weeks, 3 weeks, 1 month, 2 months, or 3 months. In some examples, the one or more additional agents are administered multiple times and/or the anti-EGFR antibody provided herein is administered multiple times.

[0964] In some examples, a modified anti-EGFR antibody, provided herein is administered with one or more antibodies or antibody fragments. The anti-EGFR antibody can be administered with one or more other antibodies that have efficacy in treating the same disease or an additional comorbidity. For example, the one or more antibodies administered with the anti-EGFR antibody can be selected from among anti-cancer antibodies, antibodies to treat autoimmune or inflammatory disease, antibodies to treat transplant rejection, antibodies to treat graft-versus-host-disease (GVHD) and antibodies to treat infectious diseases. In some examples, two or more of the anti-EGFR antibodies provided herein are administered in combination.

[0965] Examples of anti-cancer antibodies that can be co-administered with an anti-EGFR antibody provided herein include, but are not limited to, anti-17-IA cell surface antigen antibodies such as Panorex® (edrecolomab); anti-4-1BB antibodies; anti-4Dc antibodies; anti-A33 antibodies such as A33 and CDP-833; anti-α1 integrin antibodies such as natalizumab; anti-α4β7 integrin antibodies such as LDP-02; anti-αVβ1 integrin antibodies such as F-200, M-200, and SJ-749; anti-αVβ3 integrin antibodies such as abciximab, CNTO-95, Mab-17E6, and Vitaxin®; anti-complement factor 5 (C5) antibodies such as 5G1.1; anti-CA125 antibodies such as OvaRex® (oregovomab); anti-CD3 antibodies such as Nuvion® (visilizumab) and Rexomab; anti-CD4 antibodies such as IDEC-151, MDX-CD4, OKT4A; anti-CD6 antibodies such as Oncolysin B and Oncolysin CD6; anti-CD7 antibodies such as HB2; anti-CD19 antibodies such as B43, MT-103, and Oncolysin B; anti-CD20 antibodies such as 2H7, 2H7.v16, 2H7.v114, 2H7.v115, Bexxar®(tositumomab), Rituxan® (rituximab), and Zevalin® (Ibritumomab tiuxetan); anti-CD22 antibodies such as Lymphocide® (epratuzumab); anti-CD23 antibodies such as IDEC-152; anti-CD25 antibodies such as basiliximab and Zenapax® (daclizumab); anti-CD30 antibodies such as AC10, MDX-060, and SGN-30; anti-CD33 antibodies such as Mylotarg® (gemtuzumab ozogamicin), Oncolysin M, and Smart M1 95; anti-CD38 antibodies; anti-CD40 antibodies such as SGN-40 and toralizumab; anti-CD40L antibodies such as 5c8, Antova®, and IDEC-131; anti-CD44 antibodies such as bivatuzumab; anti-CD46 antibodies; anti-CD52 antibodies such as Campath® (alemtuzumab); anti-CD55 antibodies such as SC-1; anti-CD56 antibodies such as huN901-DM1; anti-CD64 antibodies such as MDX-33; anti-CD66e antibodies such as XR-303; anti-CD74 antibodies such as IMMU-1 10; anti-CD80 antibodies such as galiximab and IDEC-1 14; anti-CD89 antibodies such as MDX-214; anti-CD123 antibodies; anti-CD138 antibodies such as B-B4-DM1; anti-CD146 antibodies such as AA-98; anti-CD148 antibodies; anti-CEA antibodies such as cT84.66, labetuzumab, and Pentacea®; anti-CTLA-4 antibodies such as MDX-101; anti-CXCR4 antibodies; anti-EGFR antibodies such as ABX-EGF, Erbitux® (cetuximab), IMC-C225, and Merck Mab 425; anti-EpCAM antibodies such as Crucell's anti-EpCAM, ING-1, and IS-IL-2; anti-ephrin B2/EphB4 antibodies; anti-Her2 antibodies such as Herceptin®), MDX-210; anti-FAP (fibroblast activation protein) antibodies such as sibrotuzumab; anti-ferritin antibodies such as NXT-211; anti-FGF-1 antibodies; anti-FGF-3 antibodies; anti-FGF-8 antibodies; anti-FGFR antibodies, anti-fibrin antibodies; anti-G250 antibodies such as WX-G250 and Rencarex®; anti-GD2 ganglioside antibodies such as EMD-273063 and TriGem; anti-GD3 ganglioside antibodies such as BEC2, KW-2871, and mitumomab; anti-gpIIb/IIIa antibodies such as ReoPro; anti-heparinase antibodies; anti-Her2/ErbB2 antibodies such as Herceptin® (trastuzumab), MDX-210, and pertuzumab; anti-HLA antibodies such as Oncolym®, Smart 1D10; anti-HM1.24 antibodies; anti-ICAM antibodies such as ICM3; anti-IgA receptor antibodies; anti-IGF-1 antibodies such as CP-751871 and EM-164; anti-IGF-1R antibodies such as IMC-A12; anti-IL-6 antibodies such as CNTO-328 and elsilimomab; anti-IL-15 antibodies such as HuMax®-IL15; anti-KDR antibodies; anti-laminin 5 antibodies; anti-Lewis Y antigen antibodies such as Hu3S193 and IGN-311; anti-MCAM antibodies; anti-Muc1 antibodies such as BravaRex and TriAb; anti-NCAM antibodies such as ERIC-1 and ICRT; anti-PEM antigen antibodies such as Theragyn and Therex; anti-PSA antibodies; anti-PSCA antibodies such as IG8; anti-Ptk antibodies; anti-PTN antibodies; anti-RANKL antibodies such as AMG-162; anti-RLIP76 antibodies; anti-SK-1 antigen antibodies such as Monopharm C; anti-STEAP antibodies; anti-TAG72 antibodies such as CC49-SCA and MDX-220; anti-TGF-β antibodies such as CAT-152; anti-TNF-α antibodies such as CDP571, CDP870, D2E7, Humira® (adalimumab), and Remicade® (infliximab); anti-TRAIL-R1 and TRAIL-R2 antibodies; anti-VE-cadherin-2 antibodies; and anti-VLA-4 antibodies such as Antegren®. Furthermore, anti-idiotype antibodies including but not limited to the GD3 epitope antibody BEC2 and the gp72 epitope antibody 105AD7, can be used. In addition, bispecific antibodies including but not limited to the anti-CD3/CD20 antibody Bi20 can be used.

[0966] Examples of antibodies that can treat autoimmune or inflammatory disease, transplant rejection, GVHD, that can be co-administered with a modified anti-EGFR antibody provided herein include, but are not limited to, anti-α4β7 integrin antibodies such as LDP-02, anti-beta2 integrin antibodies such as LDP-01, anti-complement (C5) antibodies such as 5G1.1, anti-CD2 antibodies such as BTI-322, MEDI-507, anti-CD3 antibodies such as OKT3, SMART anti-CD3, anti-CD4 antibodies such as IDEC-151, MDX-CD4, OKT4A, anti-CD11a antibodies, anti-CD14 antibodies such as IC14, anti-CD18 antibodies, anti-CD23 antibodies such as IDEC 152, anti-CD25 antibodies such as Zenapax, anti-CD40L antibodies such as 5c8, Antova, IDEC-131, anti-CD64 antibodies such as MDX-33, anti-CD80 antibodies such as IDEC-114, anti-CD147 antibodies such as ABX-CBL, anti-E-selectin antibodies such as CDP850, anti-gpIIb/IIIa antibodies such as ReoPro®/Abcixima, anti-ICAM-3 antibodies such as ICM3, anti-ICE antibodies such as VX-740, anti-FcγR1 antibodies such as MDX-33, anti-IgE antibodies such as rhuMAb-E25, anti-IL-4 antibodies such as SB-240683, anti-IL-5 antibodies such as SB-240563, SCH55700, anti-IL-8 antibodies such as ABX-IL8, anti-interferon gamma antibodies, and anti-TNFa antibodies such as CDP571, CDP870, D2E7, Infliximab, MAK-195F, anti-VLA-4 antibodies such as Antegren. Examples of other Fc-containing molecules that can be co-administered to treat autoimmune or inflammatory disease, transplant rejection and GVHD include, but are not limited to, the p75 TNF receptor/Fc fusion Enbrel® (etanercept) and Regeneron's IL-1 trap.

[0967] Examples of antibodies that can be co-administered to treat infectious diseases include, but are not limited to, anti-anthrax antibodies such as ABthrax, anti-CMV antibodies such as CytoGam and sevirumab, anti-cryptosporidium antibodies such as CryptoGAM, Sporidin-G, anti-helicobacter antibodies such as Pyloran, anti-hepatitis B antibodies such as HepeX-B, Nabi-HB, anti-HIV antibodies such as HRG-214, anti-RSV antibodies such as felvizumab, HNK-20, palivizumab, RespiGam, and anti-staphylococcus antibodies such as Aurexis, Aurograb, BSYX-A110, and SE-Mab.

[0968] In some examples, a modified anti-EGFR antibody described herein is administered with one or more molecules that compete for binding to one or more Fc receptors. For example, co-administering inhibitors of the inhibitory receptor FcγRIIb can result in increased effector function. Similarly, co-administering inhibitors of the activating receptors such as FcγRIIIa can minimize unwanted effector function. Fc receptor inhibitors include, but are not limited to, Fc molecules that are engineered to act as competitive inhibitors for binding to FcγRIIb, FcγRIIIa, or other Fc receptors, as well as other immunoglobulins and specifically the treatment called IVIg (intravenous immunoglobulin). In one embodiment, the inhibitor is administered and allowed to act before the anti-EGFR antibody is administered. An alternative way of achieving the effect of sequential dosing would be to provide an immediate release dosage form of the Fc receptor inhibitor and then a sustained release formulation of the anti-EGFR antibody. The immediate release and controlled release formulations could be administered separately or be combined into one unit dosage form.

[0969] In some examples, a modified anti-EGFR antibody described herein is administered with one or more chemotherapeutic agents. Examples of chemotherapeutic agents include but are not limited to alkylating agents such as thiotepa and cyclophosphamide (CYTOXAN®); alkyl sulfonates such as busulfan, improsulfan and piposulfan; androgens such as calusterone, dromostanolone propionate, epitiostanol, mepitiostane, testolactone; anti-adrenals such as aminoglutethimide, mitotane, trilostane; anti-androgens such as flutamide, nilutamide, bicalutamide, leuprolide, and goserelin; antibiotics such as aclacinomycins, actinomycin, anthramycin, azaserine, bleomycins, cactinomycin, calicheamicin, carubicin, carminomycin, carzinophilin, chromomycins, dactinomycin, daunorubicin, detorubicin, 6-diazo-5-oxo-L-norleucine, doxorubicin, epirubicin, esorubicin, idarubicin, marcellomycin, mitomycins, mycophenolic acid, nogalamycin, olivomycins, peplomycin, porfiromycin, puromycin, quelamycin, rodorubicin, streptonigrin, streptozocin, tubercidin, ubenimex, zinostatin, zorubicin; anti estrogens including for example tamoxifen, raloxifene, aromatase inhibiting 4(5)-imidazoles, 4-hydroxytamoxifen, trioxifene, keoxifene, LY 117018, onapristone, and toremifene (Fareston); anti-metabolites such as methotrexate and 5-fluorouracil (5-FU); folic acid analogs such as denopterin, methotrexate, pteropterin, trimetrexate; aziridines such as benzodepa, carboquone, meturedepa, and uredepa; ethylenimines and methylmelamines including altretamine, triethylenemelamine, triethylenephosphoramide, triethylenethiophosphoramide and trimethylol melamine; folic acid replenisher such as folinic acid; nitrogen mustards such as chlorambucil, chlornaphazine, chlorophosphamide, estramustine, ifosfamide, mechlorethamine, mechlorethamine oxide hydrochloride, melphalan, novembichin, phenesterine, prednimustine, trofosfamide, uracil mustard; nitrosoureas such as carmustine, chlorozotocin, fotemustine, lomustine, nimustine, ranimustine; platinum analogs such as cisplatin and carboplatin; vinblastine; platinum; proteins such as arginine deiminase and asparaginase; purine analogs such as fludarabine, 6-mercaptopurine, thiamiprine, thioguanine; pyrimidine analogs such as ancitabine, azacitidine, 6-azauridine, carmofur, cytarabine, dideoxyuridine, doxifluridine, enocitabine, floxuridine, 5-FU; taxanes, e.g., paclitaxel (TAXOL®, Bristol-Myers Squibb Oncology, Princeton, N.J.) and docetaxel (TAXOTERE®), Rhone-Poulenc Rorer, Antony, France); topoisomerase inhibitor RFS 2000; thymidylate synthase inhibitor (such as Tomudex); additional chemotherapeutics including aceglatone; aldophosphamide glycoside; aminolevulinic acid; amsacrine; bestrabucil; bisantrene; edatrexate; defosfamide; demecolcine; diaziquone; difluoromethylornithine (DMFO); eflornithine; elliptinium acetate; etoglucid; gallium nitrate; hydroxyurea; lentinan; lonidamine; mitoguazone; mitoxantrone; mopidamol; nitracrine; pentostatin; phenamet; pirarubicin; podophyllinic acid; 2-ethylhydrazide; procarbazine; PSK®; razoxane; sizofiran; spirogermanium; tenuazonic acid; triaziquone; 2,2′, 2″-trichlorotriethylamine; urethan; vindesine; dacarbazine; mannomustine; mitobronitol; mitolactol; pipobroman; gacytosine; arabinoside (“Ara-C”); cyclophosphamide; thiotepa; chlorambucil; gemcitabine; 6-thioguanine; mercaptopurine; methotrexate; etoposide (VP-16); ifosfamide; mitomycin C; mitoxantrone; vincristine; vinorelbine; Navelbine; Novantrone; teniposide; daunomycin; aminopterin; Xeloda; ibandronate; CPT-11; retinoic acid; esperamycins; capecitabine; and topoisomerase inhibitors such as irinotecan. Pharmaceutically acceptable salts, acids or derivatives of any of the above can also be used. In some examples, a modified anti-EGFR antibody provided herein is administered with irinotecan (see, e.g., Pfeiffer et al. (2007) Acta. Oncol. 46(5):697-701).

[0970] A chemotherapeutic agent can be administered as a prodrug. Examples of prodrugs that can be administered with an anti-EGFR antibody described herein include, but are not limited to, phosphate-containing prodrugs, thiophosphate-containing prodrugs, sulfate-containing prodrugs, peptide-containing prodrugs, D-amino acid-modified prodrugs, glycosylated prodrugs, beta-lactam-containing prodrugs, optionally substituted phenoxy acetamide-containing prodrugs or optionally substituted phenylacetamide-containing prodrugs, 5-fluorocytosine and other 5-fluorouridine prodrugs which can be converted into the more active cytotoxic free drug.

[0971] In some examples, a modified anti-EGFR antibody provided herein is administered with one or more anti-angiogenic agents. For example, the anti-angiogenic factor can be a small molecule or a protein (e.g., an antibody, Fc fusion, or cytokine) that binds to a growth factor or growth factor receptor involved in promoting angiogenesis. Examples of anti-angiogenic agents include but are not limited to antibodies that bind to Vascular Endothelial Growth Factor (VEGF) or that bind to VEGF-R, RNA-based therapeutics that reduce levels of VEGF or VEGF-R expression, VEGF-toxin fusions, Regeneron's VEGF-trap, angiostatin (plasminogen fragment), antithrombin III, angiozyme, ABT-627, Bay 12-9566, BeneFin, bevacizumab, bisphosphonates, BMS-275291, cartilage-derived inhibitor (CDI), CAI, CD59 complement fragment, CEP-7055, Col 3, Combretastatin A-4, endostatin (collagen XVIII fragment), farnesyl transferase inhibitors, fibronectin fragment, GRO-beta, halofuginone, heparinases, heparin hexasaccharide fragment, HMV833, human chorionic gonadotropin (hCG), IM-862, interferon alpha, interferon beta, interferon gamma, interferon inducible protein 10 (IP-10), interleukin-12, kringle 5 (plasminogen fragment), marimastat, metalloproteinase inhibitors (e.g., TIMPs), 2-methoxyestradiol, MMI 270 (CGS 27023A), plasminogen activator inhibitor (PAI), platelet factor-4 (PF4), prinomastat, prolactin 16 kDa fragment, proliferin-related protein (PRP), PTK 787/ZK 222594, retinoids, solimastat, squalamine, SS3304, SU5416, SU6668, SU11248, tetrahydrocortisol-S, tetrathiomolybdate, thalidomide, thrombospondin-1 (TSP-1), TNP470, transforming growth factor beta (TGF-β) vasculostatin, vasostatin (calreticulin fragment), ZS6126, and ZD6474.

[0972] In some examples, a modified anti-EGFR antibody provided herein is administered with one or more tyrosine kinase inhibitors. Examples of tyrosine kinase inhibitors include but are not limited to quinazolines, such as PD 153035, 4-(3-chloroanilino) quinazoline; pyridopyrimidines; pyrimidopyrimidines; pyrrolopyrimidines, such as CGP 59326, CGP 60261 and CGP 62706; pyrazolopyrimidines, 4-(phenylamino)-7H-pyrrolo(2,3-d) pyrimidines; curcumin (diferuloylmethane, 4,5-bis(4-fluoroanilino) phthalimide); tyrphostins containing nitrothiophene moieties; PD-0183805 (Warner-Lambert); antisense molecules (e.g., those that bind to ErbB-encoding nucleic acid); quinoxalines (U.S. Pat. No. 5,804,396); tyrphostins (U.S. Pat. No. 5,804,396); ZD6474 (Astra Zeneca); PTK-787 (Novartis/Schering A G); pan-ErbB inhibitors such as C1-1033 (Pfizer); Affinitac (ISIS 3521; Isis/Lilly); Imatinib mesylate (STI571, Gleevec®; Novartis); PKI 166 (Novartis); GW2016 (Glaxo SmithKline); C1-1033 (Pfizer); EKB-569 (Wyeth); Semaxinib (Sugen); ZD6474 (AstraZeneca); PTK-787 (Novartis/Schering A G); INC-1 C11 (ImClone); or as described in any of the following patent publications: U.S. Pat. No. 5,804,396; PCT WO 99/09016 (American Cyanamid); PCT WO 98/43960 (American Cyanamid); PCT WO 97/38983 (Warner-Lambert); PCT WO 99/06378 (Warner-Lambert); PCT WO 99/06396 (Warner-Lambert); PCT WO 96/30347 (Pfizer, Inc.); PCT WO 96/33978 (AstraZeneca); PCT WO 96/33979 (AstraZeneca); PCT WO 96/33980 (AstraZeneca), gefitinib (Iressa®, ZD1839, AstraZeneca), and OSI-774 (Tarceva®, OSI Pharmaceuticals/Genentech).

[0973] In some examples, a modified anti-EGFR antibody described herein is administered with one or more immunomodulatory agents. Such agents can increase or decrease production of one or more cytokines, up- or down-regulate self-antigen presentation, mask MHC antigens, or promote the proliferation, differentiation, migration, or activation state of one or more types of immune cells. Examples of immunomodulatory agents include but are not limited to non-steroidal anti-inflammatory drugs (NSAIDs) such as aspirin, ibuprofen, celecoxib, diclofenac, etodolac, fenoprofen, indomethacin, ketorolac, oxaprozin, nabumetone, sulindac, tolmetin, rofecoxib, naproxen, ketoprofen, and nabumetone; steroids (e.g., glucocorticoids, dexamethasone, cortisone, hydroxycortisone, methylprednisolone, prednisone, prednisolone, triamcinolone, azulfidine eicosanoids such as prostaglandins, thromboxanes, and leukotrienes; as well as topical steroids such as anthralin, calcipotriene, clobetasol, and tazarotene); cytokines such as TGFβ, IFNα, IFNβ, IFN-γ, IL-2, IL4, IL-10; cytokine, chemokine, or receptor antagonists including antibodies, soluble receptors, and receptor-Fc fusions against BAFF, B7, CCR2, CCR5, CD2, CD3, CD4, CD6, CD7, CD8, CD11, CD14, CD15, CD17, CD18, CD20, CD23, CD28, CD40, CD40L, CD44, CD45, CD52, CD64, CD80, CD86, CD147, CD152, complement factors (C5, D) CTLA4, eotaxin, Fas, ICAM, ICOS, IFNα, IFNβ, IFNγ, IFNAR, IgE, IL-1, IL-2, IL-2R, IL-4, IL-5R, IL-6, IL-8, IL-9 IL-12, IL-13, IL-13R1, IL-15, IL-18R, IL-23, integrins, LFA-1, LFA-3, MHC, selectins, TGFβ, TNFα, TNFβ, TNF-R1, T-cell receptor, including Enbrel® (etanercept), Humira® (adalimumab), and Remicade® (infliximab); heterologous anti-lymphocyte globulin; other immunomodulatory molecules such as 2-amino-6-aryl-5 substituted pyrimidines, anti-idiotypic antibodies for MHC binding peptides and MHC fragments, azathioprine, brequinar, Bromocryptine, cyclophosphamide, cyclosporine A, D-penicillamine, deoxyspergualin, FK506, glutaraldehyde, gold, hydroxychloroquine, leflunomide, malononitriloamides (e.g., leflunomide), methotrexate, minocycline, mizoribine, mycophenolate mofetil, rapamycin, and sulfasalazine.

[0974] In some examples, a modified anti-EGFR antibody described herein is administered with one or more cytokines. Examples of cytokines include but are not limited to lymphokines, monokines, and traditional polypeptide hormones. Included among the cytokines are growth hormone such as human growth hormone, N-methionyl human growth hormone, and bovine growth hormone; parathyroid hormone; thyroxine; insulin; proinsulin; relaxin; prorelaxin; glycoprotein hormones such as follicle stimulating hormone (FSH), thyroid stimulating hormone (TSH), and luteinizing hormone (LH); hepatic growth factor; fibroblast growth factor; prolactin; placental lactogen; tumor necrosis factor-alpha and -beta; mullerian-inhibiting substance; mouse gonadotropin-associated peptide; inhibin; activin; vascular endothelial growth factor; integrin; thrombopoietin (TPO); nerve growth factors such as NGF-beta; platelet-growth factor; transforming growth factors (TGFs) such as TGF-alpha and TGF-beta; insulin-like growth factor-I and -II; erythropoietin (EPO); osteoinductive factors; interferons such as interferon-alpha, beta, and -gamma; colony stimulating factors (CSFs) such as macrophage-CSF (M-CSF); granulocyte-macrophage-CSF (GM-CSF); and granulocyte-CSF (G-CSF); interleukins (ILs) such as IL-1, IL-1alpha, IL-2, IL-3, IL-4, IL-5, IL-6, IL-7, IL-8, IL-9, IL-10, IL-11, IL-12; IL-15, a tumor necrosis factor such as TNF-alpha or TNF-beta; and other polypeptide factors including LIF and kit ligand (KL).

[0975] In some examples, a modified anti-EGFR antibody described herein is administered with one or more cytokines or other agents that stimulate cells of the immune system and enhance desired effector function. For example, agents that stimulate NK cells, including but not limited to IL-2 can be administered with an anti-EGFR antibody described herein. In another embodiment, agents that stimulate macrophages, including but not limited to C5a, formyl peptides such as N-formyl-methionyl-leucyl-phenylalanine (Beigier-Bompadre et. al. (2003) Scand. J. Immunol. 57: 221-8), can be administered with an anti-EGFR antibody described herein. Also, agents that stimulate neutrophils, including but not limited to G-CSF and GM-CSF, can be administered with an anti-EGFR antibody described herein. Furthermore, agents that promote migration of such immunostimulatory cytokines can be administered with an anti-EGFR antibody described herein. Also additional agents including, but not limited to, interferon gamma, IL-3 and IL-7 can promote one or more effector functions. In some examples, an anti-EGFR antibody described herein is administered with one or more cytokines or other agents that inhibit effector cell function.

[0976] In some examples, an anti-EGFR antibody described herein is administered with one or more antibiotics, including but not limited to: aminoglycoside antibiotics (e.g., apramycin, arbekacin, bambermycins, butirosin, dibekacin, gentamicin, kanamycin, neomycin, netilmicin, paromomycin, ribostamycin, sisomicin, spectinomycin), aminocyclitols (e.g., spectinomycin), amphenicol antibiotics (e.g., azidamfenicol, chloramphenicol, florfenicol, and thiamphenicol), ansamycin antibiotics (e.g., rifamide and rifampin), carbapenems (e.g., imipenem, meropenem, panipenem); cephalosporins (e.g., cefaclor, cefadroxil, cefamandole, cefatrizine, cefazedone, cefozopran, cefpimizole, cefpiramide, cefpirome, cefprozil, cefuroxime, cefixime, cephalexin, cephradine), cephamycins (cefbuperazone, cefoxitin, cefminox, cefmetazole, and cefotetan); lincosamides (e.g., clindamycin, lincomycin); macrolide (e.g., azithromycin, brefeldin A, clarithromycin, erythromycin, roxithromycin, tobramycin), monobactams (e.g., aztreonam, carumonam, and tigemonam); mupirocin; Oxacephems (e.g., flomoxef, latamoxef, and moxalactam); penicillins (e.g., amdinocillin, amdinocillin pivoxil, amoxicillin, bacampicillin, benzylpenicillinic acid, benzylpenicillin sodium, epicillin, fenbenicillin, floxacillin, penamecillin, penethamate hydriodide, penicillin o-benethamine, penicillin O, penicillin V, penicillin V benzoate, penicillin V hydrabamine, penimepicycline, and phenethicillin potassium); polypeptides (e.g., bacitracin, colistin, polymixin B, teicoplanin, vancomycin); quinolones (amifloxacin, cinoxacin, ciprofloxacin, enoxacin, enrofloxacin, fleroxacin, flumequine, gatifloxacin, gemifloxacin, grepafloxacin, lomefloxacin, moxifloxacin, nalidixic acid, norfloxacin, ofloxacin, oxolinic acid, pefloxacin, pipemidic acid, rosoxacin, rufloxacin, sparfloxacin, temafloxacin, tosufloxacin, and trovafloxacin); rifampin; streptogramins (e.g., quinupristin, dalfopristin); sulfonamides (sulfanilamide, sulfamethoxazole); tetracyclines (chlortetracycline, demeclocycline hydrochloride, demethylchlortetracycline, doxycycline, Duramycin, minocycline, neomycin, oxytetracycline, streptomycin, tetracycline, and vancomycin).

[0977] In some examples, a modified anti-EGFR antibody provided herein is administered with one or more anti-fungal agents, including but not limited to amphotericin B, ciclopirox, clotrimazole, econazole, fluconazole, flucytosine, itraconazole, ketoconazole, miconazole, nystatin, terbinafine, terconazole, and tioconazole. In some examples, an anti-EGFR antibody described herein is administered with one or more antiviral agents, including but not limited to protease inhibitors, reverse transcriptase inhibitors, and others, including type I interferons, viral fusion inhibitors, neuraminidase inhibitors, acyclovir, adefovir, amantadine, amprenavir, clevudine, enfuvirtide, entecavir, foscarnet, ganciclovir, idoxuridine, indinavir, lopinavir, pleconaril, ribavirin, rimantadine, ritonavir, saquinavir, trifluridine, vidarabine, and zidovudine.

[0978] A modified anti-EGFR antibody provided herein can be combined with other therapeutic regimens. For example, in one embodiment, the patient to be treated with a modified anti-EGFR antibody provided herein can receive radiation therapy. Radiation therapy can be administered according to protocols commonly employed in the art and known to the skilled artisan. Such therapy includes, but is not limited to, cesium, iridium, iodine, or cobalt radiation. The radiation therapy can be whole body irradiation, or can be directed locally to a specific site or tissue in or on the body, such as the lung, bladder, or prostate.

[0979] Typically, radiation therapy is administered in pulses over a period of time from about 1 to 2 weeks. The radiation therapy can, however, be administered over longer periods of time. For instance, radiation therapy can be administered to patients having head and neck cancer for about 6 to about 7 weeks. Optionally, the radiation therapy can be administered as a single dose or as multiple, sequential doses. The skilled medical practitioner can determine empirically the appropriate dose or doses of radiation therapy useful herein. In some examples, the anti-EGFR antibodies and optionally one or more other anti-cancer therapies are employed to treat cancer cells ex vivo. It is contemplated that such ex vivo treatment can be useful in bone marrow transplantation and particularly, autologous bone marrow transplantation. For instance, treatment of cells or tissue(s) containing cancer cells with an anti-EGFR antibody and one or more anti-cancer therapies, such as described herein, can be employed to deplete or substantially deplete the cancer cells prior to transplantation in a recipient patient.

[0980] Radiation therapy can also comprise treatment with an isotopically labeled molecule, such as an antibody. Examples of radioimmunotherapeutics include but Zevalin® (Y-90 labeled anti-CD20), LymphoCide® (Y-90 labeled anti-CD22) and Bexxar® (1-131 labeled anti-CD20).

[0981] In addition, it is contemplated that the modified anti-EGFR antibodies provided herein can be administered to a patient or subject in combination with still other therapeutic techniques such as surgery or phototherapy.

### H. EXAMPLES

[0982] The following examples are included for illustrative purposes only and are not intended to limit the scope of the invention.

### Example 1

### Generation and Expression of HC-Y104 Mutant Anti-EGFR Antibodies

[0983] Four (4) expression vectors encoding the light chain (LC) and modified heavy chain (HC) of cetuximab, separated by an internal ribosomal entry site (IRES), were generated in the pcDNA3.1-Erbitux-LC-IRES-HC backbone construct (SEQ ID NO: 306). The reference Cetuximab anti-EGFR antibody in the plasmid construct contains a sequence of nucleotides encoding an Igκ signal peptide (SEQ ID NO: 42) linked directly to the light chain sequence of nucleotides set forth in SEQ ID NO: 50 (encoding the light chain set forth in SEQ ID NO: 8). The reference Cetuximab anti-EGFR antibody in the plasmid construct also contains a sequence of nucleotides encoding an Ig signal peptide (SEQ ID NO: 41) linked directly to the heavy chain sequence of nucleotides set forth in SEQ ID NO: 48 (encoding the heavy chain set forth in SEQ ID NO: 6). The plasmid also encodes a FLAG tag (SEQ ID NO: 45) to be linked at the C-terminal end of the heavy chain constant domain.

[0984] Modified heavy chains were generated by mutating the coding sequences of the reference plasmid construct by codon substitutions to replace the nucleotides encoding Tyr (Y) at position 104 of the heavy chain amino acid sequence with those encoding Asp (D) or Glu (E). The Table 16 sets forth the mutant codons of the generated mutants, the expression vector encoding each modified anti-EGFR antibody, and the corresponding SEQ ID NO of the heavy and light chain of each generated variant.

TABLE 16
Sequences and mutant codons of generated
Y104D and Y104E mutants

| | | | Modified | | | | | | | |
|---|---|---|---|---|---|---|---|---|---|---|
| | | Expres- | Heavy Chain | | | | Light Chain | | | |
| | | sion | (SEQ ID NO) | | | | (SEQ ID NO) | | | |
| | Codon | vector | full- | | vari- | | full- | | vari- | |
| | substi- | (SEQ | length | | able | | length | | able | |
| | tution | ID NO) | nt | aa | nt | aa | nt | aa | nt | aa |
| HC-Y104D | GAU | 307 | 66 | 67 | 68 | 69 | 50 | 8 | 51 | 9 |
| HC-Y104D | GAC | 308 | | | | | | | | |
| HC-Y104E | GAA | 309 | 71 | 72 | 73 | 74 | 50 | 8 | 51 | 9 |
| HC-Y104E | GAG | 310 | | | | | | | | |

nt: nucleotide sequence
aa: amino acid sequence

[0985] FreeStyle CHO-S cells (Invitrogen) were grown to a density of 6×10⁵ cells/mL in 300 mL in a 1 L shaker flask and transfected with the above-generated constructs, using DNA FreeStyle MAX (Invitrogen) according to the manufacturer's instructions. The supernatants were harvested at 168 hr post transfection, and the expressed antibodies (mAbs) were purified using a 2-mL Protein A/G column (Bio-Rad). The eluted mAbs were dialyzed against phosphate buffered saline (PBS) and concentrated to a volume of 0.5-1 mL. The protein concentrations of the purified mAbs were determined using a NanoDrop spectrophotometer and the extinction coefficient, using the Beer-Lambert equation: A=εcl, where A is the absorbance, ε is the extinction coefficient, c is the protein concentration, and l is the path length. Table 17 sets forth the protein concentrations of the expressed antibodies.

TABLE 17
Protein Concentration

| | Codon | | | |
|---|---|---|---|---|
| | substi- | Conc. | Total | Total |
| | tution | mg/mL | Vol | Protein mg |
| HC-Y104D | GAU | 0.52 mg/mL | 0.9 mL | 0.47 mg |
| HC-Y104D | GAC | 0.87 mg/mL | 0.7 mL | 0.61 mg |
| HC-Y104D | GAA | 0.4 mg/mL | 0.5 mL | 0.2 mg |
| HC-Y104D | GAG | 0.37 mg/mL | 0.5 mL | 0.19 mg |

### Example 2

### Generation of Stable Cell Lines Expressing HC-Y104D Variant Anti-EGFR Antibody

[0986] To establish stable cell lines expressing HC-Y104D variant anti-EGFR antibody, 30 mL of CHO-S cells at an approximate density of 1.0×10⁶ cells/mL were transfected using 37.5 μg of plasmid DNA (SEQ ID NO: 308, generated in part 1 above) with 37.5 μL of FreeStyle™ MAX Reagent (Invitrogen) following the manufacturer's protocol.

[0987] Seventy two (72) hours post transfection, a 1-dimensional serial dilution strategy in CD-CHO media supplemented with GlutaMAX (8 mM) and 1 mg/mL G418 in 15 wells of 96-well round bottom plates (Nunc) was used for clonal isolation of cells. Four weeks later, clones expressing HC-Y104D mutants were screened by western blot analysis (WB) using peroxidase conjugated anti-human IgG Fc (Jackson Immunolab) as detecting antibody. Positive clones were expanded step-wise into 12-well, and then 6-well, plates, followed by T-25 and T-75 flasks and eventually into shaker flasks. Two clones, expressing at 5 mg/L of HC-Y104D, were further expanded to wavebag bioreactor production. The antibody were purified by affinity chromatography as described in Example 1, using a 30-mL Protein A column.

### Example 3

### Assessing pH-Dependent Binding of HC-Y104 Mutant Anti-EGFR Antibodies

[0988] The supernatants for flag-tagged Y104D-GAT, Y104D-GAC, Y104E-GAA, and Y104E-GAG, generated in Example 1, were assayed for binding to His-tagged soluble extracellular domain of EGFR (sEGFR-H6; Sino Biologics, Cat #10001-H08H) using a parallel, high-throughput pH sensitive ELISA under three pH conditions: pH 7.4, 6.5, and 6.0. Flag-tagged unmodified, wild-type Cetuximab anti-EGFR antibody (heavy chain set forth in SEQ ID NO: 18 and light chain set forth in SEQ ID NO: 8) and a flag-tagged humanized T030F/Y104D/Q111P mutant anti-EGFR mutant antibody (designated FDP-h3, see Example 15 in U.S. Publ. No. 2013/0266579) were used as control antibodies. FDP-h3 contains the sequence of nucleotides set forth in SEQ ID NO: 257 (light chain, encoding a light chain set forth in SEQ ID NO: 258) and the sequence of nucleotides set forth in SEQ ID NO: 64 (heavy chain, encoding a heavy chain set forth in SEQ ID NO: 65), where the heavy chain is linked directly at the C-terminus to a FLAG tag set forth in SEQ ID NO: 45.

[0989] Briefly, sEGFR-H6 was immobilized on 96 well Hi-bind plates (Costar #2592) by coating the plate overnight at 4° C. or for 2 hours at room temperature (RT) with 100 μL sEGFR-H6 antigen at 12 nM (1.32 μg/mL) in Buffer A Krebs-Ringer Buffer, pH 7.4, no serum (KRB, Sigma Aldrich, # K4002). The plates were then washed 3× with 250 μL/well of KRB. The plates were then divided into three groups and blocked, while covered, for 1 hr at RT with either 1) 250 μL pH 7.4 Buffer B (25% human serum and 1 mM lactic acid), 2) 250 μL pH 6.5 Buffer C (25% human serum and 16.7 mM lactic acid) or 3) 250 μL pH 6.0 Buffer C (25% human serum and 16.7 mM lactic acid).

[0990] The flag-tagged Y104D-GAT, Y104D-GAC, Y104E-GAA, and Y104E-GAG antibodies and the control wild-type and FDP-h3 antibodies were diluted by three-fold serial dilutions to generate seven working concentrations of each antibody under each of the pH conditions. For testing binding at pH 7.4, the Y104D-GAT, Y104D-GAC, Y104E-GAA, and Y104E-GAG mutants and control FDP-h3) were each diluted to 1000 ng/mL, 333 ng/mL, 111 ng/mL, 37 ng/mL, 12.3 ng/mL, 4.1 ng/mL, and 1.4 ng/mL in Buffer B, pH 7.4. For testing at pH 6.5 and 6.0, the Y104D-GAT, Y104D-GAC, Y104E-GAA, and Y104E-GAG mutants and control FDP-h3 were each diluted to 300 ng/mL, 100 ng/mL, 33.3 ng/mL, 11.1 ng/mL, 3.7 ng/mL, 1.2 ng/mL, and 0.4 ng/mL in Buffer C, pH 6.5 or 6.0, respectively. Wild-type Cetuximab was diluted to 100 ng/mL, 33.3 ng/mL, 11.1 ng/ml, 3.7 ng/ml, 1.2 ng/ml, 0.4 ng/mL, and 0.14 ng/mL in each of the 3 buffers at pH 7.4, 6.5 and 6.0. One hundred microliters (100 μL) of each of the antibody dilutions were added to separate wells of the 96-well plates containing the bound sEGFR-H6 antigen, which were covered and incubated at RT for 1 hr.

[0991] After incubation, the plate was washed 3× with 250 μL/well of Buffer B or Buffer C at the corresponding pH. 100 μL goat anti-FLAG-HRP detection antibody (Abcam, #ab 1238) at 500 ng/mL in Buffer B or Buffer C at the corresponding pH were added to each well. The plates were then covered and incubated for 1 hr at RT. The wells of the plates were then washed 3× with 250 μL of Buffer B or Buffer C at the corresponding pH. Finally, 100 μL SureBlue TMB Microwell Peroxidase Substrate 1-component (KPL, #52-00-03) solution was added to each well, and the plate was allowed to develop for 15-20 minutes at RT (away from light). The reaction was stopped by adding 100 μL TMB stop solution (KPL, #50-85-06) to each well, and the optical density of the wells was measured at 450 nM (OD₄₅₀) within 30 min using a Microplate Spectrophotometer (Molecular Devices, Spectra Max M3).

[0992] The ELISA was performed in triplicate, and the average OD values of the reactions were calculated for each sample and plotted with respect to the antibody concentration. The 4 Parameter Logistic nonlinear regression model was used for curve-fitting analysis of the results using the following equation: y=((A−D)/(1+((x/C)̂B)))+D, where A is the minimum asymptote, B is the slope factor, C is the inflection point/EC₅₀ value, and D is the maximum asymptote. The results are set forth in Tables 18-20 below.

TABLE 18
Binding at pH 7.4

| | A | B | C | D | |
|---|---|---|---|---|---|
| | (minimum) | (slope) | (EC₅₀) | (maximum) | R\hat{ }2 |
| Wild-type | 0.238 | 1.56 | 3.3 | 3.93 | 0.998 |
| Y104D-GAT | 0.153 | 1.24 | 6.18 | 3.74 | 1 |
| Y104D-GAC | 0.161 | 1.29 | 5.07 | 3.79 | 0.999 |
| Y104E-GAA | 0.131 | 0.956 | 18.6 | 3.81 | 1 |
| Y104E-GAG | 0.141 | 1.13 | 16.9 | 3.78 | 0.999 |
| FDP-h3 | 0.174 | 1.09 | 32.6 | 3.65 | 0.998 |

TABLE 19
Binding at pH 6.5

| | A | B | C | D | |
|---|---|---|---|---|---|
| | (minimum) | (slope) | (EC₅₀) | (maximum) | R\hat{ }2 |
| Wild-type | 0.234 | 1.49 | 2.28 | 3.88 | 0.999 |
| Y104D-GAT | 0.202 | 1.41 | 2.89 | 3.8 | 0.998 |
| Y104D-GAC | 0.194 | 1.46 | 2.36 | 3.79 | 0.999 |
| Y104E-GAA | 0.181 | 1.45 | 2.57 | 3.79 | 0.999 |
| Y104E-GAG | 0.162 | 1.36 | 2.65 | 3.82 | 0.999 |
| FDP-h3 | 0.22 | 1.42 | 4.87 | 3.76 | 1 |

TABLE 20
Binding at pH 6.0

| | A | B | C | D | |
|---|---|---|---|---|---|
| | (minimum) | (slope) | (EC₅₀) | (maximum) | R\hat{ }2 |
| Wild-type | 0.195 | 1.42 | 2.6 | 3.91 | 0.999 |
| Y104D-GAT | 0.164 | 1.41 | 3.4 | 3.81 | 0.999 |
| Y104D-GAC | 0.175 | 1.42 | 3.1 | 3.84 | 0.999 |
| Y104E-GAA | 0.169 | 1.39 | 2.88 | 3.86 | 0.998 |
| Y104E-GAG | 0.162 | 1.4 | 2.89 | 3.87 | 0.999 |
| FDP-h3 | 0.175 | 1.39 | 4.33 | 3.79 | 0.999 |

[0993] The EC₅₀ values at the different pH conditions for each tested mutant and controls are further summarized in Table 21, where a higher EC₅₀ indicates weaker binding. The Table also sets forth the ratio of binding activity of each mutant at pH 6.0 or 6.5 versus 7.4 (i.e., quotient of the inverse of the EC₅₀ at pH 6.0 or 6.5 versus pH 7.4), where a ratio >1 indicates binding is greater under the acidic pH condition than the neutral pH condition.

TABLE 21
EGFR Binding at pH 6.0, 6.5 and 7.4

| | pH 6.0 | pH 6.5 | pH 7.4 | 6.0/7.4 | 6.5/7.4 |
|---|---|---|---|---|---|
| Wild-type | 2.6 | 2.28 | 3.3 | 1.27 | 1.45 |
| Y104D-GAT | 3.4 | 2.89 | 6.18 | 1.82 | 2.14 |
| Y104D-GAC | 3.1 | 2.36 | 5.07 | 1.64 | 2.15 |
| Y104E-GAA | 2.88 | 2.57 | 18.6 | 6.46 | 7.24 |
| Y104E-GAG | 2.89 | 2.65 | 16.9 | 5.85 | 6.38 |
| FDP-h3 | 4.33 | 4.87 | 32.6 | 7.53 | 6.69 |

[0994] The results show that at pH 7.4, the wild-type cetuximab antibody exhibited a slightly higher EC₅₀ than at pH 6.5 or pH 6.0. In contrast, for the Y104 mutants and the FDP-h3 control, binding was substantially weaker at pH 7.4 than at pH 6.5 or pH 6.0 as evidenced by a higher EC₅₀ under the neutral pH tested conditions than the acidic pH tested conditions. Thus, each of the mutants exhibit a greater ratio of binding at acidic pH 6.0 or 6.5 than at pH 7.4.

[0995] At pH 7.4, the Y104E mutant exhibited an EC₅₀ value that was about 3-fold greater than the EC₅₀ value of the Y104D mutant, showing that the Y104E mutant exhibits weaker binding at pH 7.4 than the Y104E mutant. At acidic pH conditions of 6.0 and 6.5, the binding of the Y104E and Y104D mutants to EGFR was substantially the same as demonstrated by similar EC₅₀ values. Specifically, the Y104E mutants, Y104E-GAA and Y104E-GAG, exhibited EC₅₀ values of 18.6 and 16.9 at pH 7.4, which was more than 5-fold higher than that of the wild-type antibody at neutral pH (EC₅₀=3.3) and approximately 6-fold higher than the corresponding EC₅₀ values at the more acidic pHs. These results indicate the substitution of Tyr (Y) with Glu (E) at position 104 results in an antibody with reduced EGFR binding at neutral pH compared to wild-type and compared to antibodies with Asp (D) at position 104, but that retain similar levels of EGFR binding under acidic conditions.

### Example 4

### Generation of Humanized Y104D, Y104E and Y104E/Q111P Antibodies

[0996] 1. Humanization and Screening for pH-Dependence

[0997] Double stranded DNA fragments encoding the full-length light chain and heavy chain sequences of HC-Y104D/Q111P (clone 2-2; also called DP; see U.S. patent application Ser. No. 13/815,553) with a heavy chain set forth in SEQ ID NO: 53 (encoded by a nucleic acid sequence set forth in SEQ ID NO: 52) and a light chain set forth in SEQ ID NO: 8 (encoded by a nucleic acid sequence set forth in SEQ ID NO: 50) was used to generate a library of humanized clones that were then expressed and screened for pH-dependent EGFR binding and protein expression levels (see Example 15 in U.S. Publ. No. 2013/0266579). CHO-S cells were plated in 96-well plates and transfected with the humanized clones. The supernatants were collected 48 hours post transfection. The IgG concentration was determined and supernatants were adjusted to 2 ng/mL and were tested for pH-dependent binding of EGFR binding at pH 6.0 and pH 7.4 using the pH sensitive ELISA described in Example 3.

[0998] Primary hits were selected that exhibited similar or better ratios of binding activity at pH 6.0 versus binding activity at pH 7.4 compared to the parental positive control (HC-Y104D/Q111P), excluding clones with low expression levels. The primary hits were subjected to a secondary construction and confirmation screening. For screening, transfected supernatant was adjusted to concentrations of 4 ng/mL, 2 ng/mL and 1 ng/mL and were tested for pH-dependent binding of EGFR binding at pH 6.0 and pH 7.4 using the pH sensitive ELISA described in Example 3. Hits that exhibited similar or better ratios of binding activity at pH 6.0 versus binding activity at pH 7.4 compared to the parental positive control were identified, and the sequences of the identified hits were determined

2. Generation of Variants from Humanized Backbone

[0999] The humanized Y104D/Q111P cetuximab mutant antibody (designated DP-h7; SEQ ID NOS: 55 (heavy chain) and 181 (light chain)) was generated and selected as a humanized hit as described above. In the confirmation screen, the DP-h7 humanized clone exhibited a pH 6.0/pH 7.4 OD ratio at the tested concentrations as follows: 4 ng/mL, ratio of 11.30; 2 ng/mL, ratio of 7.21; 1 ng/mL, ratio of 17.35.

[1000] The plasmid encoding DP-h7 set forth in SEQ ID NO: 311, containing the nucleotide sequences set forth in SEQ ID NO: 54 (heavy chain) and 180 (light chain)), was used as a starting backbone to generate humanized Y104D, Y104E and Y104E/Q111P mutant EGFR antibodies. Briefly, the humanized backbone was used to mutate the Asp (D) at position 104 to Glu (E) and/or the Pro (P) at position 111 to Gln (Q). Table 22 summarizes the mutated codons, the generated expression vectors and the resulting nucleotide and amino acid sequences of the generated humanized antibodies.

TABLE 22
Humanized Clones

| | position | position | Expression | Modified Heavy Chain | | | | Modified Light Chain | | | |
|---|---|---|---|---|---|---|---|---|---|---|---|
| | 104 | 111 | Vector | (SEQ ID NO) | | | | (SEQ ID NO) | | | |
| | (codon: | (codon: | (SEQ ID | full-length | | variable | | full-length | | variable | |
| | 310-312) | 331-333) | NO) | nt | aa | nt | aa | nt | aa | nt | aa |
| DP-h7 | Y104D | Q111P | 311 | 54 | 55 | 54 (nt | 55 (aa | 180 | 181 | 182 | 183 |
| (back- | (GAT) | (CCT) | | | | 1-357) | 1-119) | | | | |
| bone) | | | | | | | | | | | |
| D-h | Y104D | Q111 | 312 | 56 | 57 | 56 (nt | 57 (aa | 180 | 181 | 182 | 183 |
| | (GAT) | (CAG) | | | | 1-357) | 1-119) | | | | |
| E-h | Y104E | Q111 | 313 | 58 | 59 | 60 | 61 | 180 | 181 | 182 | 183 |
| | (GAG) | (CAG) | | | | | | | | | |
| EP-h | Y104E | Q111P | 314 | 134 | 135 | 136 | 137 | 180 | 181 | 182 | 183 |
| | (GAG) | (CCT) | | | | | | | | | |

### 3. Assessing Expression of Humanized Y104D, Y104E and Y104E/Q111P Antibodies

[1001] Plasmids encoding the humanized Y104D (D-h), Y104E (E-h) and Y104E/Q111P

[1002] (EP-h) clones were expressed in FreeStyle CHO-S cells, purified and concentrated as described in Example 1, except the supernatants were harvested 96 hr post transfection and were concentrated to a final volume of 4.5 mL. The protein concentrations of the expressed antibodies were determined, using a NanoDrop spectrophotometer and the extinction coefficient, as described in Example 1. Table 23 sets forth the protein concentrations of the expressed antibodies.

TABLE 23
Protein Concentration

| | Codon | | | |
|---|---|---|---|---|
| | substi- | Conc. | Total | |
| Construct | tution | mg/mL | Vol | Total Protein mg |
| DP-h7 | GAT | 0.13 mg/mL | 4.5 mL | 0.59 mg (2 mg/L) |
| (back-bone) | | | | |
| D-h | GAT | 0.34 mg/mL | 4.5 mL | 1.53 mg (2.6 mg/L) |
| E-h | GAG | 0.31 mg/mL | 4.5 mL | 1.4 mg (2.3 mg/L) |
| EP-h | GAG | 0.24 mg/mL | 4.5 mL | 1.1 mg (1.8 mg/L) |

4. Assessing pH-Dependent Activity of Humanized Y104D (D-h), Y104E (E-h) and Y104E/Q111P (EP-h) Antibodies

[1003] a.

[1004] The humanized Y104D (D-h), Y104E (E-h) and Y104E/Q111P (EP-h) were purified as described in subsection 3 and assayed for binding to His-tagged soluble extracellular domain of EGFR (sEGFR-H6; Sino Biologics, Cat #10001-H08H) using a parallel, high-throughput pH sensitive ELISA under three pH conditions: pH 7.4, 6.5, and 6.0 as described in Example 3. The binding activities of non-humanized flag-tagged Y104D (heavy chain set forth in SEQ ID NO: 67 and light chain set forth in SEQ ID NO: 8) and non-humanized flag-tagged Y104D/Q111P (heavy chain set forth in SEQ ID NO: 53 and light chain set forth in SEQ ID NO: 8) were used as reference/control antibodies.

[1005] The ELISA was performed in triplicate, and the average OD values of the reactions were calculated for each sample and plotted with respect to the antibody concentration using the 4 Parameter Logistic nonlinear regression model described in Example 3. The results are set forth in Tables 24-26 below.

TABLE 24
Binding at pH 7.4

| | A | B | C | D | |
|---|---|---|---|---|---|
| | (minimum) | (slope) | (EC₅₀) | (maximum) | R\hat{ }2 |
| Y104D | 0.225 | 1.2 | 8.33 | 3.78 | 0.998 |
| Y104D/Q111P | 0.173 | 1.05 | 18.9 | 3.43 | 1 |
| DP-h07 | 0.192 | 1.13 | 33.6 | 3.14 | 0.997 |
| D-h | 0.179 | 1.06 | 30.2 | 3.45 | 0.999 |
| E-h | 0.195 | 1.09 | 46.1 | 3.23 | 0.995 |
| EP-h | 0.227 | 1.19 | 69.8 | 2.91 | 0.998 |

TABLE 25
Binding at pH 6.5

| | A | B | C | D | |
|---|---|---|---|---|---|
| | (minimum) | (slope) | (EC₅₀) | (maximum) | R\hat{ }2 |
| Y104D | 0.243 | 1.49 | 4.09 | 3.87 | 0.998 |
| Y104D/Q111P | 0.225 | 1.43 | 8.96 | 3.85 | 0.998 |
| DP-h07 | 0.222 | 1.41 | 6.91 | 3.83 | 0.999 |
| D-h | 0.222 | 1.46 | 7.57 | 3.84 | 0.999 |
| E-h | 0.205 | 1.51 | 5.87 | 3.85 | 0.999 |
| EP-h | 0.201 | 1.45 | 6.37 | 3.89 | 0.999 |

TABLE 26
Binding at pH 6.0

| | A | B | C | D | |
|---|---|---|---|---|---|
| | (minimum) | (slope) | (EC₅₀) | (maximum) | R\hat{ }2 |
| Y104D | 0.245 | 1.5 | 3.91 | 3.88 | 0.998 |
| Y104D/Q111P | 0.29 | 1.46 | 7.19 | 3.9 | 0.996 |
| DP-h07 | 0.297 | 1.67 | 4.15 | 3.83 | 0.998 |
| D-h | 0.266 | 1.58 | 4.87 | 3.89 | 0.998 |
| E-h | 0.222 | 1.45 | 3.18 | 3.92 | 0.997 |
| EP-h | 0.281 | 1.59 | 3.92 | 3.92 | 0.997 |

[1006] The EC₅₀ values at the different pH conditions for each tested mutant and controls are further summarized in Table 27, where a higher EC₅₀ indicates weaker binding. The Table also sets forth the ratio of binding activity of each mutant at pH 6.0 or 6.5 versus 7.4 (i.e., quotient of the inverse of the EC₅₀ at pH 6.0 or 6.5 versus pH 7.4), where a ratio >1 indicates binding is greater under the acidic pH condition than the neutral pH condition.

TABLE 27
EGFR Binding at pH 6.0, 6.5 and 7.4

| | pH 6.0 | pH 6.5 | pH 7.4 | 6.0/7.4 | 6.5/7.4 |
|---|---|---|---|---|---|
| Y104D | 3.91 | 4.09 | 8.33 | 2.13 | 2.04 |
| Y104D/Q111P | 7.19 | 8.96 | 18.9 | 2.62 | 2.11 |
| DP-h07 | 4.15 | 6.91 | 33.6 | 8.10 | 4.86 |
| D-h | 4.87 | 7.57 | 30.2 | 6.20 | 3.99 |
| E-h | 3.18 | 5.87 | 46.1 | 14.5 | 7.85 |
| EP-h | 3.92 | 6.37 | 69.8 | 17.81 | 10.96 |

[1007] The results show that all tested variants exhibit a higher EC₅₀, and hence weaker binding, at pH 7.4 than at pH 6.5 or pH 6.0. The binding activity as evidenced by the EC₅₀ of the tested mutants were all substantially the same at pH 6.0 and pH 6.5, although the variant Y104D/Q111P exhibited slightly decreased binding activity at pH 6.0 and 6.5 compared to the other tested variants. Specifically, the EC₅₀ values for non-humanized Y104D, DP-h07, D-h, E-h, and EP-h antibodies were similar at pH 6.0, ranging in values from approximately 3 to 4. The EC₅₀ of non-humanized Y104D/Q111P was slightly higher at pH 6.0 (EC₅₀=7.2). The mutants also exhibited similar EC₅₀ values at pH 6.5. Thus, at acidic pH, all the constructs tested have similar EGFR-binding affinity.

[1008] Each of the mutants exhibited a greater ratio of binding activity at acidic pH 6.0 or 6.5 than at pH 7.4. The humanized Y104E (E-h) and Y104D/Q111P (EP-h) exhibited the highest ratio of binding activity at acidic pH 6.0 or 6.5 than at pH 7.4 of the constructs tested. The E-h and EP-h mutants variants also exhibited the highest EC₅₀ values, and hence weakest binding activity, at pH 7.4, which were 46.1 and 69.8 at pH 7.4, respectively. Thus, the higher ratio of binding activity, as measured by the ratio of the inverse of the EC₅₀ at pH 6.0 or 6.5 versus pH 7.4, are due to reduced binding affinities (increased EC₅₀ values) at neutral pH.

[1009] b.

[1010] In a further experiment, the purified, humanized Y104D (D-h), Y104E (E-h) and Y104E/Q111P (EP-h) were assayed for binding to His-tagged soluble extracellular domain of EGFR (sEGFR-H6; Sino Biologics, Cat #10001-H08H) using a parallel, high-throughput pH sensitive ELISA under three pH conditions: pH 7.4, 6.5, and 6.0 as described above. For comparison, the binding activities of non-humanized flag-tagged Y104D (heavy chain set forth in SEQ ID NO: 67 and light chain set forth in SEQ ID NO: 8), non-humanized flag-tagged Y104E (heavy chain set forth in SEQ ID NO: 71 and light chain set forth in SEQ ID NO: 8), and non-humanized flag-tagged Y104D, which was purified from an established stable CHO cell line that expresses the heavy chain set forth in SEQ ID NO: 67 and light chain set forth in SEQ ID NO: 8, designated Y104D-S.

[1011] The ELISA was performed in triplicate, and the average OD values of the reactions were calculated for each sample and plotted with respect to the antibody concentration using the 4 Parameter Logistic nonlinear regression model as described above. The results are set forth in Tables 28-30 below.

TABLE 28
Binding at pH 7.4

| | A | B | C | D | |
|---|---|---|---|---|---|
| | (minimum) | (slope) | (EC₅₀) | (maximum) | R\hat{ }2 |
| Y104D-S | 0.253 | 1.04 | 16 | 3.79 | 0.998 |
| Y104D | 0.174 | 1.04 | 10.6 | 3.7 | 0.999 |
| Y104E | 0.229 | 0.927 | 38.9 | 2.89 | 0.997 |
| D-h | 0.235 | 0.944 | 56.4 | 2.03 | 0.990 |
| E-h | 0.251 | 1.76 | 59.3 | 1.44 | 0.996 |
| EP-h | 0.198 | 0.825 | 209 | 1.83 | 0.999 |

TABLE 29
Binding at pH 6.5

| | A | B | C | D | |
|---|---|---|---|---|---|
| | (minimum) | (slope) | (EC₅₀) | (maximum) | R\hat{ }2 |
| Y104D-S | 0.176 | 1.41 | 5.07 | 3.86 | 0.999 |
| Y104D | 0.232 | 1.54 | 4.58 | 3.86 | 0.998 |
| Y104E | 0.215 | 1.42 | 4.31 | 3.81 | 0.999 |
| D-h | 0.213 | 1.41 | 12.7 | 3.82 | 0.999 |
| E-h | 0.185 | 1.3 | 9.82 | 3.94 | 0.998 |
| EP-h | 0.197 | 1.23 | 12.1 | 3.93 | 0.997 |

TABLE 30
Binding at pH 6.0

| | A | B | C | D | |
|---|---|---|---|---|---|
| | (minimum) | (slope) | (EC₅₀) | (maximum) | R\hat{ }2 |
| Y104D-S | 0.223 | 1.61 | 4.27 | 3.84 | 0.999 |
| Y104D | 0.241 | 1.55 | 3.96 | 3.82 | 0.997 |
| Y104E | 0.243 | 1.58 | 3.21 | 3.83 | 0.996 |
| D-h | 0.189 | 1.45 | 6.77 | 3.88 | 0.999 |
| E-h | 0.228 | 1.67 | 4.82 | 3.87 | 0.998 |
| EP-h | 0.21 | 1.54 | 4.28 | 3.91 | 0.998 |

[1012] The EC₅₀ values at the different pH conditions for each tested mutant and controls are further summarized in Table 31, and the ratio of binding activity of each mutant at pH 6.0 or 6.5 versus 7.4 (i.e., quotient of the inverse of the EC₅₀ at pH 6.0 or 6.5 versus pH 7.4) is provided.

TABLE 31
EGFR Binding at pH 6.0, 6.5 and 7.4

| | pH 6.0 | pH 6.5 | pH 7.4 | 6.0/7.4 | 6.5/7.4 |
|---|---|---|---|---|---|
| Y104D-S | 4.27 | 5.07 | 16 | 3.75 | 3.16 |
| Y104D | 3.96 | 4.58 | 10.6 | 2.68 | 2.31 |
| Y104E | 3.21 | 4.31 | 38.9 | 12.12 | 9.03 |
| D-h | 6.77 | 12.7 | 56.4 | 8.33 | 4.44 |
| E-h | 4.82 | 9.82 | 59.3 | 12.30 | 6.04 |
| EP-h | 4.28 | 12.1 | 209 | 48.83 | 17.3 |

[1013] The results indicate the Y104E mutants exhibited greater pH selective binding at acidic pH than the Y104D mutants. For example, the non-humanized Y104E mutant exhibited reduced binding at pH 7.4, with an EC₅₀ at pH 7.4 of 38.9, than at pH 6.0 (EC₅₀=3.21) or at pH 6.5 (EC₅₀=4.31). The humanized Y104E (E-h) antibody exhibited slightly decreased binding activity at pH 7.4 than the corresponding non-humanized Y104E antibody, although the ratio of binding activity at pH 6.0 or 6.5 versus 7.4 was substantially the same as those for non-humanized Y104E antibody. The humanized Y104E/Q111P mutant (EP-h) exhibited the highest selectivity for EGFR binding under acidic conditions of the constructs tested. Specifically, the EP-h mutant exhibited an EC₅₀ 209 at pH 7.4, which was approximately 49-fold higher than the corresponding EC₅₀ value pH 6.0 and approximately 17-fold higher than the corresponding EC₅₀ value pH 6.5, showing that the EP-h humanized variant exhibits substantially weaker binding at pH 7.4 than the other variants tested. The binding activity of the EP-h variant at acidic pH 6.0 or 6.5 as demonstrated by the EC₅₀ values was similar to the other tested variants.

[1014] The Y104D mutants also exhibited acidic-pH selective binding activity, but to a lesser extent than was demonstrated by the Y104E mutants. The humanized Y104D (D-h) mutant exhibited an EC₅₀ at pH 7.4 of 56.4, which was approximately 8-fold higher than the E₅₀ at pH 6.0 and approximately 4-fold higher than the EC₅₀ at pH 6.5.

### Example 5

### Generation of and Screening for Anti-EGFR Mutants with pH-Dependent EGFR Binding

[1015] 1. Generating a Library of Anti-EGFR Mutant Antibodies

[1016] A library of single point mutants of the Cetuximab anti-EGFR antibody was constructed and generated by site-directed mutagenesis in the pcDNA3.1-Erbitux-LC-IRES-HC backbone construct (SEQ ID NO: 306). The construct contains a reference cetuximab anti-EGFR antibody plasmid construct that contains a sequence of nucleotides encoding an Igκ signal peptide (SEQ ID NO: 42) linked directly to the light chain sequence of nucleotides set forth in SEQ ID NO: 50 (encoding the light chain set forth in SEQ ID NO: 8). The reference Cetuximab anti-EGFR antibody in the plasmid construct also contains a sequence of nucleotides encoding an Ig signal peptide (SEQ ID NO: 41) linked directly to the heavy chain sequence of nucleotides set forth in SEQ ID NO: 48 (encoding the heavy chain set forth in SEQ ID NO: 6). The plasmid also contained a FLAG tag (SEQ ID NO: 45) linked at the C-terminal end of the heavy chain constant domain.

[1017] The library was generated to contain variants of Cetuximab anti-EGFR antibody, whereby each member contained a single amino acid mutation compared to the reference antibody at one of one hundred amino acid positions within the variable regions of either the heavy chain (SEQ ID NO: 6 with the variable heavy chain set forth in SEQ ID NO: 7) or light chain (SEQ ID NO: 8 with the variable light chain set forth in SEQ ID NO: 9) of Cetuximab. The positions that were varied were in the variable region of the light and heavy chains of the Cetuximab anti-EGFR antibody, with the majority of positions in the CDRs of the light or heavy chain. At least 15 amino acid mutations were made at each position. Each member of the library was sequenced, and glycerol stocks of members of the library were prepared and stored at −80° C.

[1018] 2. Screening Anti-EGFR Mutants

[1019] Plasmid DNA was transfected into monolayer CHO-S cells (Invitrogen, Cat. No. 11619-012) using Lipofectamine 2000 (Invitrogen, Cat. No. 11668-027) following the manufacturer's protocol. Briefly, CHO-S cells were seeded the night before transfection and grown in DMEM with 10% Fetal Bovine Serum (FBS). The next day, after the cells were 80% confluent, the medium of the CHO-S cells was replaced with Opti-MEM (Invitrogen). A mixture of plasmid DNA and Lipofectamine (0.2 μg DNA and 0.5 μL Lipofetamine) was added to the CHO-S cells and incubated overnight. The next day, the cells were supplemented with CD-CHO serum free media (Invitrogen, Cat. No. 10743-029). Supernatant from transfected cells was collected after transfection (generally 72 hours after transfection).

[1020] The supernatants were assayed for binding to soluble extracellular domain of EGF receptor (EGFR sECD) using a parallel, high-throughput pH sensitive ELISA, as described in Example 3, except the antibodies were added at two dilutions (Dilution 1 and Dilution 2) and binding was measured under two pH conditions: pH 7.4 and pH 6.0.

[1021] a. Antibody Binding Results

[1022] The ELISA was performed in duplicate, and the average OD values of the duplicate reactions were calculated. Based on the OD value, variant anti-EGFR antibodies that exhibited higher binding activity to sEGFR-H6 at pH 6.0 compared to at pH 7.0 were identified and are set forth in Table 32. The Table sets forth the average OD at pH 6.0 (OD_{pH 6.0}), average OD at pH 7.4 (OD_{pH 7.4}), and the ratio of the average OD values at pH 6.0 and 7.4 (OD_{pH 6.0}/OD_{pH 7.4}) for the variant antibodies at Dilution 1 and Dilution 2.

TABLE 32
Variant anti-EGFR antibodies

| | | | | | | OD_{pH 6.0}/ | |
|---|---|---|---|---|---|---|---|
| | | Average OD_{pH 6.0} | | Average OD_{pH 67.4} | | OD_{pH 7.4} | |
| | Muta- | Dilu- | Dilu- | Dilu- | Dilu- | Dilu- | Dilu- |
| Chain | tion | tion 1 | tion 2 | tion 1 | tion 2 | tion 1 | tion 2 |
| HC | T23K | 2.6495 | 1.048 | 2.125 | 0.619 | 1.25 | 1.695 |
| HC | T23H | 2.744 | 1.5525 | 2.3405 | 0.833 | 1.173 | 1.851 |
| HC | T23R | 2.5055 | 1.2625 | 2.061 | 0.6245 | 1.216 | 2.03 |
| HC | T23A | 2.8735 | 1.142 | 2.5135 | 0.5 | 1.15 | 2.283 |
| HC | T23C | 2.654 | 1.3115 | 2.2505 | 0.687 | 1.179 | 1.909 |
| HC | T23E | 2.8785 | 1.3525 | 2.678 | 0.667 | 1.075 | 2.028 |
| HC | T23G | 1.679 | 0.3445 | 0.9585 | 0.1655 | 1.753 | 2.08 |
| HC | T23I | 2.709 | 1.4085 | 2.309 | 0.81 | 1.175 | 1.736 |
| HC | T23M | 2.3595 | 0.8185 | 1.772 | 0.504 | 1.332 | 1.636 |
| HC | T23N | 2.627 | 1.0915 | 1.823 | 0.6175 | 1.45 | 1.778 |
| HC | T23P | 0.252 | 0.1 | 0.1395 | 0.0965 | 1.812 | 1.035 |
| HC | T23S | 1.644 | 1.2745 | 1.9785 | 0.692 | 0.832 | 1.841 |
| HC | T23V | 0.258 | 0.1445 | 0.1775 | 0.106 | 1.454 | 1.365 |
| HC | T23W | 2.346 | 0.8765 | 1.8475 | 0.3025 | 1.274 | 2.896 |
| HC | T23L | 2.602 | 0.576 | 1.7855 | 0.2815 | 1.575 | 2.048 |
| HC | V24R | 0.091 | 0.085 | 0.079 | 0.071 | 1.158 | 1.194 |
| HC | V24A | 3.065 | 1.568 | 2.184 | 0.523 | 1.403 | 3.003 |
| HC | V24E | 0.780 | 0.232 | 0.300 | 0.114 | 2.596 | 2.044 |
| HC | V24F | 2.386 | 0.645 | 1.156 | 0.336 | 2.057 | 2.937 |
| HC | V24G | 3.144 | 1.932 | 2.687 | 0.716 | 1.170 | 2.701 |
| HC | V24I | 1.669 | 0.485 | 0.590 | 0.176 | 2.837 | 2.761 |
| HC | V24M | 2.765 | 0.957 | 1.311 | 0.350 | 2.110 | 2.738 |
| HC | V24P | 1.512 | 0.388 | 0.511 | 0.165 | 2.961 | 2.355 |
| HC | V24S | 3.093 | 1.588 | 2.109 | 0.533 | 1.467 | 2.979 |
| HC | V24T | 2.605 | 0.821 | 1.091 | 0.276 | 2.389 | 2.983 |
| HC | V24L | 1.678 | 0.538 | 0.431 | 0.146 | 3.889 | 3.695 |
| HC | S25H | 3.006 | 1.752 | 1.255 | 0.311 | 2.456 | 5.667 |
| HC | S25R | 3.104 | 1.367 | 1.807 | 0.388 | 1.721 | 3.484 |
| HC | S25A | 3.206 | 2.225 | 2.164 | 0.563 | 1.481 | 3.957 |
| HC | S25C | 2.947 | 1.369 | 1.858 | 0.431 | 1.586 | 3.184 |
| HC | S25D | 3.076 | 1.717 | 2.194 | 0.578 | 1.487 | 3.073 |
| HC | S25E | 3.099 | 1.210 | 2.658 | 0.663 | 1.166 | 1.827 |
| HC | S25F | 3.135 | 1.758 | 2.822 | 0.787 | 1.111 | 2.234 |
| HC | S25G | 2.937 | 1.218 | 1.142 | 0.317 | 2.579 | 3.845 |
| HC | S25I | 3.042 | 2.171 | 1.994 | 0.494 | 1.525 | 4.394 |
| HC | S25M | 3.158 | 2.444 | 2.774 | 0.759 | 1.138 | 3.230 |
| HC | S25P | 0.899 | 0.240 | 0.250 | 0.107 | 3.629 | 2.240 |
| HC | S25Q | 1.999 | 0.527 | 0.495 | 0.146 | 4.034 | 3.628 |
| HC | S25T | 2.795 | 0.510 | 1.483 | 0.162 | 1.886 | 1.567 |
| HC | S25V | 3.245 | 2.478 | 2.331 | 0.804 | 1.393 | 3.082 |
| HC | S25L | 3.155 | 1.773 | 1.631 | 0.441 | 1.935 | 4.040 |
| HC | G26H | 1.7955 | 0.545 | 1.1055 | 0.303 | 1.625 | 0.902 |
| HC | G26R | 1.9395 | 0.6055 | 1.444 | 0.338 | 1.342 | 1.793 |
| HC | G26D | 2.2105 | 0.7555 | 1.4155 | 0.4275 | 1.56 | 1.77 |
| HC | G26F | 0.588 | 0.2175 | 0.323 | 0.1345 | 1.822 | 1.628 |
| HC | G26M | 1.32 | 0.4535 | 0.841 | 0.2495 | 1.571 | 1.817 |
| HC | G26N | 2.9605 | 1.9525 | 2.99 | 1.2305 | 0.99 | 1.587 |
| HC | G26P | 1.001 | 0.4445 | 1.0425 | 0.309 | 0.977 | 1.441 |
| HC | G26Q | 2.45 | 0.8875 | 1.9265 | 0.5285 | 1.272 | 1.687 |
| HC | G26S | 2.226 | 0.7665 | 1.883 | 0.463 | 1.185 | 1.673 |
| HC | G26Y | 1.4695 | 0.447 | 0.8715 | 0.252 | 1.686 | 1.772 |
| HC | G26L | 1.015 | 0.312 | 0.64 | 0.2245 | 1.586 | 1.395 |
| HC | F27H | 1.488 | 0.342 | 0.817 | 0.243 | 1.823 | 1.418 |
| HC | F27R | 1.367 | 0.861 | 0.774 | 0.239 | 1.767 | 3.628 |
| HC | F27A | 2.936 | 2.213 | 2.241 | 0.769 | 1.310 | 2.880 |
| HC | F27D | 3.061 | 1.792 | 2.674 | 1.026 | 1.147 | 1.754 |
| HC | F27E | 2.792 | 1.306 | 2.418 | 0.910 | 1.155 | 1.435 |
| HC | F27G | 2.644 | 2.445 | 1.733 | 0.536 | 1.536 | 4.766 |
| HC | F27M | 2.935 | 1.233 | 1.980 | 0.405 | 1.483 | 3.047 |
| HC | F27P | 2.711 | 0.953 | 1.603 | 0.501 | 1.720 | 1.990 |
| HC | F27Q | 2.207 | 1.265 | 1.554 | 0.439 | 1.420 | 2.880 |
| HC | F27S | 1.898 | 0.508 | 0.918 | 0.253 | 2.067 | 2.014 |
| HC | F27T | 2.836 | 1.241 | 1.875 | 0.531 | 1.513 | 2.341 |
| HC | F27V | 1.419 | 0.712 | 0.614 | 0.190 | 2.311 | 3.752 |
| HC | F27W | 1.270 | 0.319 | 0.577 | 0.176 | 2.204 | 1.816 |
| HC | F27Y | 2.187 | 0.711 | 1.017 | 0.245 | 2.217 | 2.908 |
| HC | F27L | 2.492 | 0.784 | 1.562 | 0.478 | 1.595 | 1.639 |
| HC | S28K | 3.1285 | 2.125 | 2.927 | 1.176 | 1.069 | 1.804 |
| HC | S28H | 2.1735 | 0.7705 | 1.4715 | 0.4045 | 1.481 | 1.918 |
| HC | S28R | 2.9975 | 1.3625 | 2.5995 | 0.8495 | 1.153 | 1.604 |
| HC | S28A | 2.148 | 0.8335 | 1.468 | 0.3875 | 1.464 | 2.158 |
| HC | S28D | 1.97 | 0.7175 | 1.1875 | 0.3805 | 1.663 | 1.89 |
| HC | S28I | 2.8715 | 1.3185 | 2.2545 | 0.6505 | 1.273 | 2.022 |
| HC | S28M | 2.635 | 0.984 | 1.911 | 0.574 | 1.38 | 1.718 |
| HC | S28P | 2.6535 | 1.132 | 1.94 | 0.606 | 1.371 | 1.868 |
| HC | S28Q | 2.98 | 1.4105 | 2.4315 | 0.775 | 1.229 | 1.823 |
| HC | S28V | 3.1155 | 1.6905 | 2.79 | 1.0175 | 1.12 | 1.675 |
| HC | S28W | 3.1335 | 1.685 | 2.628 | 0.909 | 1.193 | 1.855 |
| HC | S28L | 2.4775 | 1.9575 | 1.863 | 0.563 | 1.331 | 3.481 |
| HC | L29K | 1.476 | 0.837 | 0.747 | 0.371 | 1.976 | 2.418 |
| HC | L29H | 1.329 | 0.717 | 0.661 | 0.264 | 2.020 | 2.714 |
| HC | L29A | 1.626 | 0.643 | 1.109 | 0.344 | 1.473 | 2.080 |
| HC | L29D | 0.504 | 0.232 | 0.329 | 0.164 | 1.531 | 1.409 |
| HC | L29G | 0.728 | 0.198 | 0.464 | 0.163 | 1.567 | 1.224 |
| HC | L29I | 2.250 | 1.661 | 2.020 | 0.893 | 1.121 | 1.864 |
| HC | L29M | 2.220 | 1.031 | 1.836 | 0.637 | 1.214 | 1.619 |
| HC | L29N | 0.352 | 0.326 | 0.253 | 0.149 | 1.390 | 1.254 |
| HC | L29S | 0.916 | 0.414 | 0.470 | 0.206 | 1.952 | 2.038 |
| HC | L29V | 0.975 | 0.516 | 0.543 | 0.287 | 1.796 | 1.800 |
| HC | T30H | 1.483 | 0.576 | 1.123 | 0.290 | 1.326 | 1.999 |
| HC | T30R | 1.646 | 0.808 | 1.487 | 0.412 | 1.110 | 1.961 |
| HC | T30D | 1.445 | 0.582 | 1.043 | 0.295 | 1.387 | 1.974 |
| HC | T30G | 1.130 | 0.455 | 0.925 | 0.257 | 1.222 | 1.776 |
| HC | T30I | 1.407 | 0.801 | 1.108 | 0.308 | 1.280 | 1.433 |
| HC | T30M | 1.241 | 0.454 | 1.054 | 0.221 | 1.191 | 2.061 |
| HC | T30N | 1.471 | 0.530 | 1.126 | 0.270 | 1.306 | 1.956 |
| HC | T30P | 1.341 | 0.405 | 0.936 | 0.263 | 1.432 | 1.544 |
| HC | T30S | 1.225 | 0.510 | 1.080 | 0.287 | 1.134 | 1.785 |
| HC | T30V | 1.210 | 0.521 | 1.130 | 0.246 | 1.074 | 2.113 |
| HC | T30W | 1.393 | 0.528 | 0.960 | 0.242 | 1.451 | 2.183 |
| HC | T30Y | 1.121 | 0.534 | 0.941 | 0.369 | 1.193 | 1.432 |
| HC | N31K | 3.216 | 2.270 | 2.256 | 0.713 | 1.433 | 3.242 |
| HC | N31H | 3.153 | 2.116 | 1.952 | 0.544 | 1.656 | 3.922 |
| HC | N31D | 2.946 | 1.227 | 1.746 | 0.424 | 1.687 | 2.891 |
| HC | N31E | 3.210 | 2.909 | 2.668 | 1.594 | 1.233 | 1.914 |
| HC | N31G | 3.218 | 1.917 | 2.566 | 0.760 | 1.254 | 2.529 |
| HC | N31I | 2.651 | 0.860 | 0.921 | 0.241 | 2.881 | 3.567 |
| HC | N31T | 3.102 | 0.773 | 2.226 | 0.567 | 1.394 | 1.364 |
| HC | N31V | 2.724 | 1.003 | 1.105 | 0.137 | 2.466 | 3.747 |
| HC | N31L | 2.920 | 0.983 | 1.990 | 0.575 | 1.467 | 1.713 |
| HC | Y32H | 1.011 | 0.488 | 0.684 | 0.248 | 1.483 | 1.963 |
| HC | Y32R | 1.253 | 0.454 | 1.049 | 0.280 | 1.194 | 1.616 |
| HC | Y32C | 0.667 | 0.256 | 0.405 | 0.182 | 1.645 | 1.408 |
| HC | Y32M | 1.035 | 0.368 | 0.756 | 0.237 | 1.366 | 1.556 |
| HC | Y32N | 0.837 | 0.447 | 0.524 | 0.121 | 1.604 | 1.707 |
| HC | Y32T | 0.705 | 0.296 | 0.435 | 0.176 | 1.624 | 1.685 |
| HC | Y32V | 0.767 | 0.216 | 0.518 | 0.223 | 1.484 | 0.967 |
| HC | Y32L | 0.793 | 0.299 | 0.550 | 0.169 | 1.443 | 1.787 |
| HC | G33E | 3.048 | 1.162 | 2.323 | 0.474 | 1.349 | 2.617 |
| HC | G33M | 2.472 | 0.669 | 1.904 | 0.537 | 1.305 | 1.246 |
| HC | G33S | 3.245 | 2.463 | 3.160 | 1.936 | 1.027 | 1.303 |
| HC | G33T | 2.346 | 0.748 | 1.959 | 0.714 | 1.226 | 1.038 |
| HC | G33Y | 0.121 | 0.106 | 0.123 | 0.097 | 0.982 | 1.095 |
| HC | V34A | 0.566 | 0.197 | 0.280 | 0.102 | 2.024 | 1.928 |
| HC | V34C | 0.756 | 0.432 | 0.798 | 0.164 | 0.950 | 2.625 |
| HC | V34I | 1.803 | 0.772 | 1.352 | 0.391 | 1.334 | 1.971 |
| HC | V34M | 1.219 | 0.681 | 0.925 | 0.331 | 1.320 | 2.069 |
| HC | V34P | 0.064 | 0.058 | 0.060 | 0.026 | 1.074 | 1.116 |
| HC | V34L | 1.105 | 0.429 | 0.772 | 0.206 | 1.434 | 2.118 |
| HC | H35I | 0.069 | 0.457 | 0.055 | 0.056 | 1.260 | 1.024 |
| HC | H35Q | 0.895 | 0.219 | 0.450 | 0.155 | 1.996 | 1.409 |
| HC | W36K | 0.062 | 0.056 | 0.056 | 0.028 | 1.111 | 1.002 |
| HC | W36A | 0.532 | 0.150 | 0.274 | 0.104 | 1.944 | 1.453 |
| HC | W36I | 1.421 | 0.791 | 1.241 | 0.495 | 1.148 | 1.600 |
| HC | W36V | 1.501 | 0.790 | 1.364 | 0.480 | 1.099 | 1.647 |
| HC | W36Y | 1.189 | 0.456 | 0.887 | 0.277 | 1.340 | 1.648 |
| HC | V50K | 0.105 | 0.118 | 0.101 | 0.101 | 1.040 | 1.170 |
| HC | V50H | 2.570 | 0.974 | 2.352 | 0.727 | 1.095 | 1.340 |
| HC | V50A | 3.196 | 1.613 | 2.597 | 1.019 | 1.233 | 1.582 |
| HC | V50D | 0.626 | 0.212 | 0.406 | 0.149 | 1.543 | 1.434 |
| HC | V50E | 0.400 | 0.146 | 0.339 | 0.134 | 1.181 | 1.086 |
| HC | V50G | 2.847 | 1.118 | 2.232 | 0.841 | 1.277 | 1.333 |
| HC | V50I | 1.551 | 0.414 | 0.555 | 0.182 | 2.795 | 2.298 |
| HC | V50N | 1.816 | 0.522 | 0.804 | 0.239 | 2.268 | 2.188 |
| HC | V50Q | 2.843 | 1.043 | 1.913 | 0.503 | 1.487 | 2.079 |
| HC | V50T | 3.264 | 2.695 | 3.246 | 2.339 | 1.005 | 1.153 |
| HC | V50L | 0.695 | 0.232 | 0.298 | 0.064 | 2.387 | 1.833 |
| HC | I51K | 1.861 | 0.635 | 1.068 | 0.288 | 1.764 | 2.207 |
| HC | I51H | 2.446 | 1.912 | 1.183 | 0.304 | 2.070 | 2.334 |
| HC | I51A | 3.027 | 1.178 | 1.436 | 0.346 | 2.378 | 3.590 |
| HC | I51C | 2.501 | 0.848 | 1.306 | 0.307 | 1.916 | 2.774 |
| HC | I51E | 0.879 | 0.283 | 0.491 | 0.184 | 1.791 | 1.537 |
| HC | I51G | 1.017 | 0.313 | 0.347 | 0.143 | 2.925 | 2.186 |
| HC | I51N | 2.508 | 0.797 | 1.240 | 0.302 | 2.026 | 2.641 |
| HC | I51Q | 3.286 | 1.967 | 2.878 | 0.877 | 1.142 | 2.255 |
| HC | I51S | 3.087 | 1.406 | 2.276 | 0.582 | 1.357 | 2.418 |
| HC | I51V | 3.312 | 2.820 | 3.310 | 1.602 | 1.001 | 1.761 |
| HC | I51Y | 0.997 | 0.301 | 0.626 | 0.203 | 1.592 | 1.477 |
| HC | I51L | 3.286 | 2.289 | 3.038 | 0.951 | 1.082 | 2.408 |
| HC | W52I | 0.855 | 0.249 | 0.392 | 0.148 | 2.183 | 1.690 |
| HC | W52N | 2.980 | 1.888 | 2.290 | 0.917 | 1.307 | 2.061 |
| HC | W52Y | 2.989 | 2.413 | 2.187 | 0.883 | 1.369 | 2.092 |
| HC | S53H | 3.290 | 2.779 | 3.202 | 1.848 | 1.027 | 1.504 |
| HC | S53R | 1.585 | 0.458 | 1.356 | 0.346 | 1.372 | 1.658 |
| HC | S53A | 3.441 | 3.325 | 3.360 | 2.616 | 1.024 | 1.299 |
| HC | S53C | 3.202 | 1.915 | 3.321 | 1.734 | 0.964 | 1.069 |
| HC | S53G | 3.389 | 3.289 | 3.381 | 2.854 | 1.002 | 1.153 |
| HC | S53I | 3.311 | 2.974 | 3.261 | 2.174 | 1.016 | 1.370 |
| HC | S53M | 3.210 | 1.689 | 3.018 | 1.025 | 1.068 | 1.659 |
| HC | S53P | 3.229 | 2.414 | 3.160 | 1.676 | 1.022 | 1.444 |
| HC | S53Q | 2.856 | 1.126 | 1.921 | 0.400 | 1.624 | 3.485 |
| HC | S53L | 3.298 | 2.391 | 3.295 | 1.757 | 1.001 | 1.472 |
| HC | S53T | 3.272 | 2.617 | 3.473 | 1.037 | 0.948 | 2.643 |
| HC | S53V | 3.315 | 2.305 | 3.321 | 1.652 | 0.998 | 1.406 |
| HC | S53Y | 3.377 | 2.797 | 3.235 | 1.999 | 1.044 | 1.398 |
| HC | G54H | 2.800 | 1.241 | 2.238 | 0.855 | 1.251 | 1.454 |
| HC | G54R | 2.341 | 0.748 | 1.702 | 0.518 | 1.376 | 1.446 |
| HC | G54A | 3.253 | 1.980 | 2.792 | 1.083 | 1.172 | 2.214 |
| HC | G54C | 1.636 | 0.346 | 1.055 | 0.238 | 1.551 | 1.452 |
| HC | G54D | 2.758 | 1.191 | 1.987 | 0.553 | 1.390 | 2.156 |
| HC | G54P | 2.336 | 0.773 | 1.320 | 0.370 | 1.772 | 2.089 |
| HC | G54S | 0.769 | 0.217 | 0.389 | 0.136 | 2.004 | 1.609 |
| HC | G55H | 3.289 | 1.916 | 2.919 | 0.957 | 1.132 | 2.085 |
| HC | G55R | 3.195 | 2.738 | 3.099 | 1.332 | 1.031 | 1.355 |
| HC | G55M | 3.076 | 1.452 | 2.727 | 0.766 | 1.131 | 1.889 |
| HC | G55S | 3.007 | 1.282 | 2.530 | 0.579 | 1.189 | 2.225 |
| HC | G55Y | 1.350 | 0.339 | 0.707 | 0.204 | 1.923 | 1.666 |
| HC | N56K | 2.941 | 1.283 | 2.775 | 1.030 | 1.059 | 1.246 |
| HC | N56A | 3.111 | 1.131 | 1.799 | 0.374 | 1.730 | 3.022 |
| HC | N56P | 1.322 | 1.332 | 0.880 | 0.235 | 1.525 | 1.408 |
| HC | N56S | 3.288 | 1.415 | 2.511 | 0.693 | 1.311 | 2.044 |
| HC | N56V | 3.021 | 1.201 | 2.660 | 0.867 | 1.136 | 1.385 |
| HC | N56G | 2.992 | 0.991 | 1.578 | 0.390 | 1.897 | 2.545 |
| HC | T57H | 3.064 | 1.040 | 1.792 | 0.457 | 1.711 | 2.276 |
| HC | T57R | 3.367 | 2.070 | 3.090 | 1.247 | 1.090 | 1.661 |
| HC | T57L | 3.316 | 1.923 | 2.903 | 1.052 | 1.143 | 1.827 |
| HC | T57A | 3.376 | 2.238 | 2.975 | 1.110 | 1.135 | 2.020 |
| HC | T57C | 3.287 | 1.693 | 2.703 | 0.814 | 1.216 | 2.088 |
| HC | T57D | 1.860 | 0.440 | 0.804 | 0.203 | 2.318 | 2.167 |
| HC | T57F | 3.414 | 2.680 | 3.125 | 1.839 | 1.093 | 1.458 |
| HC | T57M | 3.349 | 1.930 | 2.975 | 0.531 | 1.127 | 1.840 |
| HC | T57N | 3.125 | 1.170 | 2.145 | 0.537 | 1.459 | 2.182 |
| HC | T57Q | 3.359 | 1.699 | 2.774 | 0.792 | 1.211 | 2.147 |
| HC | T57W | 3.311 | 1.776 | 2.772 | 0.725 | 1.195 | 2.452 |
| HC | T57Y | 3.456 | 2.210 | 3.124 | 1.459 | 1.106 | 1.515 |
| HC | D58L | 1.607 | 0.742 | 2.044 | 0.579 | 0.786 | 1.314 |
| HC | D58G | 3.291 | 1.793 | 2.723 | 0.965 | 1.209 | 1.862 |
| HC | D58M | 2.134 | 0.790 | 1.507 | 0.545 | 1.451 | 1.449 |
| HC | D58N | 3.266 | 2.134 | 2.887 | 1.412 | 1.132 | 1.325 |
| HC | D58Q | 1.683 | 0.481 | 0.844 | 0.256 | 2.005 | 1.878 |
| HC | Y59H | 1.692 | 0.571 | 1.066 | 0.251 | 1.610 | 2.246 |
| HC | Y59R | 2.971 | 1.756 | 2.709 | 0.914 | 1.097 | 2.003 |
| HC | Y59A | 1.621 | 0.399 | 0.699 | 0.186 | 2.832 | 2.149 |
| HC | Y59C | 2.628 | 0.883 | 1.790 | 0.421 | 1.579 | 2.078 |
| HC | Y59D | 1.032 | 0.272 | 0.353 | 0.145 | 2.967 | 1.863 |
| HC | Y59E | 2.457 | 0.801 | 1.227 | 0.164 | 2.016 | 2.581 |
| HC | Y59G | 2.663 | 1.600 | 2.376 | 0.842 | 1.116 | 1.900 |
| HC | Y59I | 2.962 | 1.866 | 2.199 | 0.996 | 1.483 | 1.922 |
| HC | Y59P | 0.575 | 0.187 | 0.183 | 0.132 | 3.219 | 1.417 |
| HC | Y59Q | 2.915 | 1.383 | 2.283 | 0.557 | 1.277 | 2.480 |
| HC | Y59S | 2.891 | 1.523 | 2.571 | 0.732 | 1.128 | 2.070 |
| HC | Y59T | 3.059 | 1.678 | 2.585 | 0.702 | 1.184 | 2.510 |
| HC | Y59V | 2.561 | 0.945 | 1.685 | 0.417 | 1.743 | 2.247 |
| HC | Y59W | 2.886 | 1.247 | 2.089 | 0.496 | 1.382 | 2.708 |
| HC | N60K | 3.012 | 1.697 | 2.313 | 0.893 | 1.306 | 1.902 |
| HC | N60A | 3.104 | 1.847 | 2.729 | 0.958 | 1.140 | 1.935 |
| HC | N60C | 2.070 | 0.596 | 1.170 | 0.299 | 1.824 | 1.999 |
| HC | N60D | 0.196 | 0.800 | 0.113 | 0.089 | 1.736 | 1.142 |
| HC | N60F | 2.386 | 0.935 | 1.355 | 0.398 | 2.039 | 2.370 |
| HC | N60G | 2.647 | 0.944 | 1.537 | 0.407 | 1.831 | 2.323 |
| HC | N60P | 1.097 | 0.342 | 0.419 | 0.171 | 2.634 | 2.003 |
| HC | N60Q | 1.676 | 0.484 | 0.889 | 0.262 | 1.946 | 1.854 |
| HC | N60S | 2.148 | 0.696 | 1.104 | 0.299 | 1.953 | 2.362 |
| HC | N60T | 2.755 | 1.083 | 1.910 | 0.520 | 1.490 | 2.093 |
| HC | N60Y | 2.844 | 1.291 | 2.407 | 0.676 | 1.197 | 1.921 |
| HC | T61N | 3.043 | 1.882 | 2.603 | 0.936 | 1.176 | 2.012 |
| HC | T61Q | 2.187 | 0.731 | 1.372 | 0.188 | 1.591 | 1.974 |
| HC | P62G | 2.593 | 1.009 | 1.765 | 0.508 | 1.469 | 1.985 |
| HC | F63H | 3.170 | 2.002 | 2.715 | 0.773 | 1.168 | 2.592 |
| HC | F63R | 2.377 | 0.681 | 0.957 | 0.259 | 2.485 | 2.636 |
| HC | F63L | 3.150 | 1.606 | 2.218 | 0.627 | 1.421 | 2.560 |
| HC | F63A | 2.387 | 0.746 | 1.016 | 0.263 | 2.349 | 2.841 |
| HC | F63C | 0.911 | 0.242 | 0.272 | 0.112 | 3.440 | 2.160 |
| HC | F63D | 2.984 | 1.277 | 1.839 | 0.456 | 1.629 | 2.806 |
| HC | F63G | 2.914 | 1.094 | 1.516 | 0.401 | 1.951 | 2.767 |
| HC | F63M | 3.073 | 1.526 | 2.122 | 0.449 | 1.448 | 3.401 |
| HC | F63N | 2.284 | 0.672 | 1.240 | 0.156 | 1.843 | 2.201 |
| HC | F63Q | 2.906 | 1.180 | 1.622 | 0.373 | 1.794 | 3.164 |
| HC | F63S | 2.894 | 1.014 | 1.511 | 0.162 | 1.917 | 6.301 |
| HC | F63V | 3.032 | 1.585 | 2.090 | 0.477 | 1.451 | 3.338 |
| HC | T64R | 3.052 | 1.908 | 2.925 | 0.933 | 1.044 | 2.051 |
| HC | T64L | 3.052 | 2.189 | 2.814 | 1.108 | 1.093 | 1.976 |
| HC | T64C | 2.770 | 1.082 | 2.220 | 0.589 | 1.250 | 1.839 |
| HC | T64F | 0.165 | 0.087 | 0.084 | 0.089 | 1.974 | 0.985 |
| HC | T64G | 3.088 | 1.925 | 3.011 | 0.955 | 1.026 | 2.018 |
| HC | T64N | 0.232 | 0.132 | 0.092 | 0.087 | 2.550 | 1.516 |
| HC | T64Q | 1.555 | 0.542 | 0.952 | 0.253 | 1.641 | 2.150 |
| HC | T64V | 2.784 | 1.255 | 2.046 | 0.261 | 1.362 | 2.224 |
| HC | S65H | 3.222 | 2.639 | 3.201 | 1.556 | 1.007 | 1.704 |
| HC | S65R | 3.199 | 2.297 | 3.080 | 1.033 | 1.041 | 2.226 |
| HC | S65L | 3.302 | 2.824 | 3.272 | 1.846 | 1.009 | 1.530 |
| HC | S65C | 3.233 | 2.804 | 2.969 | 1.317 | 1.090 | 1.761 |
| HC | S65E | 3.256 | 2.320 | 3.089 | 1.304 | 1.054 | 1.779 |
| HC | S65F | 3.231 | 2.362 | 3.025 | 1.420 | 1.068 | 1.664 |
| HC | S65G | 3.337 | 2.992 | 3.335 | 2.388 | 1.000 | 1.253 |
| HC | S65I | 3.220 | 2.108 | 2.996 | 1.180 | 1.075 | 1.788 |
| HC | S65M | 3.102 | 1.898 | 2.758 | 0.940 | 1.125 | 2.018 |
| HC | S65N | 3.224 | 2.277 | 2.919 | 1.060 | 1.106 | 2.151 |
| HC | S65P | 2.795 | 1.197 | 1.892 | 0.466 | 1.479 | 2.568 |
| HC | S65Q | 3.193 | 2.250 | 2.951 | 1.100 | 1.082 | 2.055 |
| HC | S65T | 3.191 | 1.802 | 2.779 | 0.915 | 1.149 | 1.972 |
| HC | S65W | 3.227 | 2.510 | 3.114 | 1.514 | 1.037 | 1.662 |
| HC | S65Y | 3.322 | 2.816 | 3.201 | 1.928 | 1.038 | 1.462 |
| HC | R66L | 3.149 | 1.674 | 2.785 | 0.636 | 1.131 | 2.636 |
| HC | R66A | 2.441 | 1.026 | 2.008 | 0.491 | 1.217 | 2.091 |
| HC | R66C | 2.036 | 0.645 | 1.022 | 0.281 | 1.992 | 2.298 |
| HC | R66E | 1.775 | 0.595 | 1.089 | 0.316 | 1.627 | 1.889 |
| HC | R66F | 2.462 | 0.416 | 1.195 | 0.259 | 2.070 | 1.603 |
| HC | R66N | 3.065 | 1.089 | 2.343 | 0.658 | 1.308 | 1.655 |
| HC | R66P | 0.469 | 0.169 | 0.306 | 0.123 | 1.537 | 1.378 |
| HC | R66Q | 3.010 | 1.421 | 2.386 | 0.712 | 1.261 | 1.999 |
| HC | R66S | 2.805 | 0.994 | 1.945 | 0.414 | 1.444 | 2.404 |
| HC | R66T | 0.612 | 0.200 | 0.326 | 0.123 | 1.879 | 1.628 |
| HC | R66V | 3.198 | 1.703 | 3.077 | 0.525 | 1.039 | 1.530 |
| HC | R66G | 2.234 | 0.565 | 0.977 | 0.247 | 2.291 | 2.292 |
| HC | L67A | 2.784 | 1.152 | 1.921 | 0.487 | 1.449 | 2.377 |
| HC | L67C | 3.189 | 1.868 | 2.640 | 0.675 | 1.208 | 2.768 |
| HC | L67D | 0.113 | 0.086 | 0.085 | 0.079 | 1.343 | 1.078 |
| HC | L67E | 2.953 | 1.155 | 2.003 | 0.552 | 1.475 | 2.151 |
| HC | L67I | 2.974 | 1.183 | 1.920 | 0.461 | 1.548 | 2.579 |
| HC | L67M | 2.889 | 1.300 | 2.100 | 0.558 | 1.376 | 2.345 |
| HC | L67Q | 2.297 | 0.634 | 1.116 | 0.297 | 2.057 | 2.151 |
| HC | L67S | 3.114 | 1.560 | 2.496 | 0.646 | 1.248 | 2.418 |
| HC | L67T | 2.929 | 1.127 | 1.712 | 0.393 | 1.713 | 2.871 |
| HC | L67V | 2.755 | 0.875 | 1.330 | 0.346 | 2.072 | 2.529 |
| HC | L67Y | 3.171 | 1.933 | 2.840 | 0.454 | 1.117 | 2.152 |
| HC | S68K | 3.274 | 2.096 | 2.959 | 1.092 | 1.109 | 1.920 |
| HC | S68H | 3.269 | 2.602 | 3.284 | 1.358 | 0.995 | 1.918 |
| HC | S68R | 3.146 | 2.252 | 2.931 | 1.108 | 1.074 | 2.033 |
| HC | S68L | 3.054 | 1.591 | 2.441 | 0.645 | 1.251 | 2.471 |
| HC | S68C | 3.161 | 2.327 | 3.050 | 1.209 | 1.037 | 1.924 |
| HC | S68D | 3.228 | 1.835 | 2.822 | 0.413 | 1.144 | 2.303 |
| HC | S68E | 3.123 | 2.025 | 2.841 | 0.965 | 1.100 | 2.104 |
| HC | S68F | 0.256 | 0.128 | 0.137 | 0.093 | 1.863 | 1.379 |
| HC | S68G | 2.935 | 1.566 | 2.300 | 0.778 | 1.278 | 2.013 |
| HC | S68I | 3.209 | 1.895 | 2.834 | 0.788 | 1.132 | 2.404 |
| HC | S68N | 3.114 | 1.621 | 2.721 | 0.762 | 1.145 | 2.132 |
| HC | S68Q | 3.222 | 2.075 | 3.033 | 1.071 | 1.064 | 1.938 |
| HC | S68T | 3.310 | 2.716 | 3.261 | 1.779 | 1.015 | 1.532 |
| HC | S68V | 3.099 | 1.701 | 2.661 | 0.761 | 1.165 | 2.237 |
| HC | I69A | 0.429 | 0.133 | 0.242 | 0.086 | 1.773 | 1.542 |
| HC | I69C | 1.045 | 0.317 | 0.810 | 0.186 | 1.291 | 1.705 |
| HC | I69G | 0.112 | 0.133 | 0.085 | 0.062 | 1.312 | 1.147 |
| HC | I69Y | 0.523 | 0.157 | 0.340 | 0.132 | 1.538 | 1.194 |
| HC | N70H | 3.459 | 1.652 | 2.155 | 0.741 | 1.736 | 2.229 |
| HC | N70R | 1.720 | 0.369 | 0.689 | 0.206 | 2.997 | 1.792 |
| HC | N70L | 3.184 | 1.401 | 2.232 | 0.608 | 1.429 | 2.305 |
| HC | N70D | 1.788 | 0.523 | 0.817 | 0.257 | 2.242 | 2.036 |
| HC | N70E | 3.223 | 1.695 | 2.394 | 0.721 | 1.373 | 2.350 |
| HC | N70F | 3.263 | 2.109 | 2.985 | 1.368 | 1.095 | 1.557 |
| HC | N70G | 2.992 | 1.363 | 2.359 | 0.675 | 1.268 | 2.021 |
| HC | N70I | 3.240 | 1.310 | 1.934 | 0.575 | 1.862 | 2.278 |
| HC | N70P | 0.192 | 0.445 | 0.375 | 0.235 | 0.502 | 2.019 |
| HC | N70Q | 3.194 | 1.500 | 2.347 | 0.854 | 1.364 | 1.765 |
| HC | N70S | 3.247 | 2.088 | 2.937 | 0.496 | 1.105 | 2.094 |
| HC | N70T | 3.207 | 1.679 | 2.488 | 0.747 | 1.289 | 2.248 |
| HC | N70V | 0.241 | 2.063 | 2.833 | 1.232 | 0.085 | 1.677 |
| HC | N70Y | 3.152 | 1.553 | 2.029 | 0.788 | 1.888 | 1.980 |
| HC | K71H | 3.096 | 1.235 | 2.366 | 0.657 | 1.309 | 1.883 |
| HC | K71R | 2.741 | 0.871 | 1.745 | 0.462 | 1.571 | 1.888 |
| HC | K71L | 3.205 | 1.828 | 2.883 | 1.290 | 1.112 | 1.422 |
| HC | K71A | 1.772 | 0.457 | 1.075 | 0.320 | 1.649 | 1.430 |
| HC | K71C | 3.353 | 1.977 | 2.687 | 1.093 | 1.248 | 1.891 |
| HC | K71F | 3.342 | 1.506 | 3.119 | 1.260 | 1.072 | 1.195 |
| HC | K71G | 2.921 | 0.979 | 2.094 | 0.536 | 1.402 | 1.827 |
| HC | K71Q | 3.049 | 1.267 | 2.617 | 1.082 | 1.165 | 1.179 |
| HC | K71S | 3.114 | 1.168 | 2.534 | 0.688 | 1.237 | 1.716 |
| HC | K71T | 2.533 | 0.830 | 1.688 | 0.299 | 1.500 | 1.544 |
| HC | K71V | 3.160 | 1.663 | 2.787 | 0.929 | 1.134 | 1.790 |
| HC | K71W | 3.294 | 1.708 | 3.017 | 1.261 | 1.092 | 1.356 |
| HC | K71Y | 3.334 | 2.035 | 2.898 | 1.410 | 1.150 | 1.443 |
| HC | D72K | 3.108 | 1.388 | 2.427 | 1.747 | 1.281 | 0.795 |
| HC | D72H | 3.203 | 1.653 | 2.744 | 0.711 | 1.179 | 2.325 |
| HC | D72R | 3.355 | 2.011 | 3.182 | 0.938 | 1.055 | 2.144 |
| HC | D72L | 3.252 | 2.402 | 1.511 | 0.561 | 2.153 | 4.308 |
| HC | D72A | 2.976 | 1.272 | 3.026 | 1.109 | 0.982 | 1.415 |
| HC | D72G | 2.694 | 0.972 | 1.583 | 0.429 | 1.711 | 2.272 |
| HC | D72I | 3.200 | 1.798 | 2.711 | 0.827 | 1.182 | 2.179 |
| HC | D72M | 3.144 | 1.529 | 2.747 | 0.621 | 1.149 | 2.470 |
| HC | D72N | 3.303 | 1.878 | 2.982 | 0.927 | 1.112 | 2.026 |
| HC | D72Q | 3.157 | 2.535 | 2.782 | 0.790 | 1.137 | 2.402 |
| HC | D72S | 3.166 | 1.894 | 3.042 | 0.931 | 1.041 | 2.037 |
| HC | D72V | 3.241 | 2.071 | 3.115 | 1.044 | 1.041 | 1.987 |
| HC | D72W | 3.182 | 1.722 | 1.248 | 0.368 | 2.551 | 4.678 |
| HC | D72Y | 3.172 | 1.646 | 2.513 | 0.711 | 1.269 | 2.319 |
| HC | N73H | 3.095 | 1.105 | 2.128 | 0.423 | 1.455 | 2.618 |
| HC | N73R | 2.908 | 1.026 | 1.738 | 0.387 | 1.672 | 2.650 |
| HC | N73L | 3.179 | 1.682 | 2.800 | 0.883 | 1.137 | 1.917 |
| HC | N73A | 2.307 | 0.773 | 1.016 | 0.300 | 2.229 | 2.589 |
| HC | N73C | 3.111 | 1.210 | 2.023 | 0.483 | 1.558 | 2.506 |
| HC | N73G | 2.985 | 1.059 | 1.910 | 0.512 | 1.584 | 2.072 |
| HC | N73I | 3.336 | 2.124 | 3.024 | 1.005 | 1.107 | 2.116 |
| HC | N73M | 3.226 | 1.307 | 1.902 | 0.511 | 1.782 | 2.558 |
| HC | N73P | 2.396 | 0.732 | 1.262 | 0.359 | 1.913 | 2.036 |
| HC | N73Q | 3.055 | 1.153 | 2.047 | 0.221 | 1.494 | 2.850 |
| HC | N73S | 2.962 | 1.097 | 1.959 | 0.485 | 1.541 | 2.265 |
| HC | N73T | 2.752 | 1.024 | 1.951 | 0.544 | 1.404 | 1.896 |
| HC | N73V | 2.522 | 0.733 | 1.382 | 0.358 | 1.827 | 2.046 |
| HC | N73W | 2.294 | 0.718 | 1.278 | 0.342 | 1.783 | 2.100 |
| HC | N73Y | 3.150 | 1.234 | 2.165 | 0.464 | 1.455 | 2.656 |
| HC | S74K | 2.981 | 1.013 | 1.883 | 0.413 | 1.601 | 2.457 |
| HC | S74H | 3.070 | 1.253 | 1.963 | 0.476 | 1.579 | 2.634 |
| HC | S74R | 3.062 | 1.331 | 2.222 | 0.511 | 1.387 | 2.604 |
| HC | S74L | 3.292 | 2.221 | 3.205 | 1.053 | 1.027 | 2.110 |
| HC | S74A | 2.809 | 0.996 | 1.874 | 0.436 | 1.501 | 2.288 |
| HC | S74C | 2.721 | 0.882 | 1.705 | 0.347 | 1.619 | 2.544 |
| HC | S74D | 2.946 | 1.353 | 1.967 | 0.467 | 1.500 | 2.897 |
| HC | S74E | 3.001 | 1.279 | 2.213 | 0.444 | 1.358 | 2.892 |
| HC | S74G | 2.857 | 2.244 | 1.714 | 0.429 | 1.762 | 2.895 |
| HC | S74I | 2.986 | 1.082 | 2.151 | 0.495 | 1.388 | 2.194 |
| HC | S74M | 3.068 | 1.146 | 2.144 | 0.455 | 1.458 | 2.517 |
| HC | S74P | 3.196 | 1.545 | 2.503 | 0.615 | 1.280 | 2.511 |
| HC | S74T | 3.201 | 1.466 | 2.578 | 0.612 | 1.246 | 2.395 |
| HC | S74V | 3.242 | 1.928 | 3.245 | 0.910 | 0.999 | 2.118 |
| HC | S74Y | 2.854 | 0.982 | 1.605 | 0.337 | 1.866 | 2.919 |
| HC | K75H | 3.278 | 1.961 | 2.863 | 0.371 | 1.146 | 2.638 |
| HC | K75R | 3.111 | 1.259 | 2.012 | 0.479 | 1.559 | 2.639 |
| HC | K75L | 3.216 | 1.226 | 2.331 | 0.710 | 1.390 | 1.725 |
| HC | K75A | 2.879 | 1.070 | 1.846 | 0.428 | 1.570 | 2.504 |
| HC | K75C | 3.008 | 1.064 | 1.550 | 0.359 | 1.948 | 2.967 |
| HC | K75E | 3.070 | 1.191 | 2.020 | 0.523 | 1.560 | 2.279 |
| HC | K75F | 3.068 | 1.189 | 1.735 | 0.388 | 1.770 | 3.064 |
| HC | K75M | 2.776 | 0.884 | 1.342 | 0.362 | 2.076 | 2.450 |
| HC | K75Q | 3.200 | 1.533 | 2.319 | 0.526 | 1.384 | 2.914 |
| HC | K75T | 2.633 | 0.807 | 1.408 | 0.349 | 1.870 | 2.311 |
| HC | K75V | 2.908 | 0.939 | 1.435 | 0.325 | 2.032 | 2.962 |
| HC | K75W | 2.656 | 0.797 | 1.098 | 0.280 | 2.422 | 2.850 |
| HC | K75Y | 2.993 | 1.195 | 1.770 | 0.397 | 1.693 | 3.015 |
| HC | S76H | 2.719 | 0.806 | 1.324 | 0.300 | 2.054 | 2.694 |
| HC | S76R | 2.877 | 1.042 | 1.473 | 0.328 | 1.953 | 3.171 |
| HC | S76L | 2.187 | 0.500 | 0.830 | 0.215 | 2.636 | 2.323 |
| HC | S76A | 2.598 | 0.982 | 1.652 | 0.580 | 1.608 | 1.693 |
| HC | S76C | 2.490 | 0.855 | 1.304 | 0.339 | 1.910 | 2.537 |
| HC | S76D | 2.429 | 1.711 | 1.130 | 0.257 | 2.196 | 2.827 |
| HC | S76E | 3.053 | 1.236 | 1.893 | 0.457 | 1.615 | 2.706 |
| HC | S76F | 3.013 | 1.143 | 1.958 | 0.443 | 1.540 | 2.582 |
| HC | S76M | 2.936 | 1.267 | 1.924 | 0.458 | 1.527 | 2.767 |
| HC | S76P | 2.566 | 0.824 | 1.186 | 0.291 | 2.172 | 2.835 |
| HC | S76Q | 2.670 | 0.843 | 1.578 | 0.420 | 1.697 | 2.009 |
| HC | S76T | 2.515 | 0.805 | 1.182 | 0.268 | 2.133 | 3.024 |
| HC | S76Y | 2.788 | 0.921 | 1.393 | 0.344 | 2.004 | 2.685 |
| HC | Q77H | 3.135 | 1.285 | 2.396 | 0.640 | 1.310 | 2.008 |
| HC | Q77R | 2.600 | 1.185 | 1.976 | 0.618 | 1.344 | 1.957 |
| HC | Q77L | 2.256 | 0.589 | 0.937 | 0.234 | 2.408 | 2.520 |
| HC | Q77A | 3.109 | 1.370 | 2.320 | 0.532 | 1.343 | 2.577 |
| HC | Q77E | 3.162 | 1.660 | 2.729 | 0.331 | 1.159 | 2.647 |
| HC | Q77G | 2.148 | 0.548 | 0.843 | 0.216 | 2.551 | 2.545 |
| HC | Q77I | 2.653 | 0.784 | 1.189 | 0.292 | 2.232 | 2.690 |
| HC | Q77M | 2.489 | 0.861 | 1.213 | 0.289 | 2.108 | 2.989 |
| HC | Q77N | 3.002 | 1.184 | 1.800 | 0.471 | 1.668 | 2.516 |
| HC | Q77S | 2.791 | 1.085 | 1.936 | 0.496 | 1.441 | 2.193 |
| HC | Q77V | 3.246 | 1.643 | 2.722 | 0.633 | 1.193 | 2.597 |
| HC | Q77W | 1.891 | 0.537 | 0.880 | 0.243 | 2.149 | 2.209 |
| HC | Q77Y | 2.328 | 0.650 | 1.248 | 0.285 | 1.880 | 2.291 |
| HC | Y93H | 0.386 | 0.134 | 0.204 | 0.088 | 1.883 | 1.512 |
| HC | Y93V | 0.570 | 0.193 | 0.327 | 0.117 | 1.739 | 1.652 |
| HC | Y93W | 0.167 | 0.081 | 0.095 | 0.072 | 1.743 | 1.126 |
| HC | Y94R | 0.611 | 0.510 | 0.600 | 0.264 | 1.034 | 1.935 |
| HC | Y94L | 0.484 | 0.210 | 0.256 | 0.121 | 1.888 | 1.738 |
| HC | R97H | 1.065 | 0.411 | 0.502 | 0.219 | 2.148 | 1.884 |
| HC | R97W | 0.065 | 0.062 | 0.075 | 0.032 | 0.859 | 0.930 |
| HC | A98P | 1.057 | 0.812 | 0.619 | 0.386 | 1.709 | 1.755 |
| HC | L99N | 1.202 | 0.662 | 0.655 | 0.401 | 1.836 | 1.652 |
| HC | L99W | 1.312 | 1.114 | 0.926 | 0.350 | 1.417 | 1.659 |
| HC | T100H | 3.152 | 2.147 | 3.128 | 1.981 | 1.008 | 1.084 |
| HC | T100L | 3.133 | 1.851 | 2.685 | 1.361 | 1.167 | 1.364 |
| HC | T100A | 3.201 | 2.377 | 2.996 | 1.752 | 1.068 | 1.356 |
| HC | T100D | 2.957 | 0.907 | 2.741 | 0.868 | 1.079 | 1.046 |
| HC | T100I | 2.910 | 1.690 | 2.199 | 1.376 | 1.448 | 1.229 |
| HC | T100N | 3.070 | 1.883 | 2.895 | 1.350 | 1.060 | 1.398 |
| HC | T100P | 0.819 | 0.253 | 0.262 | 0.119 | 3.141 | 2.119 |
| HC | T100Q | 3.167 | 1.966 | 3.093 | 1.685 | 1.025 | 1.168 |
| HC | T100S | 3.166 | 1.748 | 2.953 | 0.816 | 1.072 | 2.142 |
| HC | T100V | 3.237 | 1.957 | 2.775 | 1.307 | 1.173 | 1.499 |
| HC | T100Y | 2.924 | 1.238 | 2.473 | 0.937 | 1.182 | 1.321 |
| HC | Y101H | 3.319 | 2.884 | 3.256 | 2.203 | 1.019 | 1.309 |
| HC | Y101E | 0.081 | 0.075 | 0.090 | 0.038 | 0.894 | 0.995 |
| HC | Y101F | 2.795 | 0.990 | 1.719 | 0.450 | 1.632 | 2.202 |
| HC | Y101M | 3.072 | 1.802 | 2.893 | 1.574 | 1.063 | 1.145 |
| HC | Y101W | 3.237 | 1.648 | 3.078 | 0.756 | 1.052 | 2.178 |
| HC | Y102R | 0.091 | 0.086 | 0.074 | 0.077 | 1.221 | 1.109 |
| HC | Y102C | 0.099 | 0.085 | 0.088 | 0.087 | 1.128 | 1.042 |
| HC | Y102D | 0.093 | 0.084 | 0.086 | 0.080 | 1.084 | 1.059 |
| HC | Y102I | 0.094 | 0.082 | 0.073 | 0.075 | 1.290 | 1.099 |
| HC | Y102N | 0.096 | 0.082 | 0.077 | 0.075 | 1.250 | 1.088 |
| HC | Y102W | 3.058 | 1.411 | 2.711 | 0.941 | 1.129 | 1.500 |
| HC | D103R | 0.134 | 0.093 | 0.115 | 0.098 | 1.168 | 0.942 |
| HC | D103L | 0.082 | 0.095 | 0.085 | 0.034 | 0.963 | 1.307 |
| HC | D103A | 3.114 | 0.281 | 2.833 | 1.442 | 1.099 | 0.195 |
| HC | D103C | 0.076 | 0.078 | 0.075 | 0.072 | 1.021 | 1.087 |
| HC | D103I | 0.109 | 0.091 | 0.087 | 0.091 | 1.254 | 1.006 |
| HC | D103P | 0.075 | 0.079 | 0.081 | 0.068 | 0.928 | 1.146 |
| HC | D103Q | 2.998 | 1.947 | 2.901 | 1.601 | 1.033 | 1.219 |
| HC | D103Y | 0.077 | 0.081 | 0.076 | 0.072 | 1.013 | 1.129 |
| HC | Y104H | 1.429 | 0.974 | 0.777 | 0.531 | 1.860 | 1.840 |
| HC | Y104L | 1.717 | 0.894 | 0.988 | 0.419 | 1.747 | 2.133 |
| HC | Y104D | 0.493 | 0.334 | 0.199 | 0.123 | 2.471 | 2.701 |
| HC | Y104F | 1.890 | 1.364 | 0.982 | 0.539 | 1.927 | 2.530 |
| HC | Y104I | 1.268 | 0.552 | 0.690 | 0.323 | 1.838 | 1.709 |
| HC | Y104M | 0.956 | 0.789 | 0.528 | 0.398 | 1.803 | 1.971 |
| HC | Y104S | 0.441 | 0.333 | 0.165 | 0.110 | 2.678 | 3.052 |
| HC | Y104V | 0.839 | 0.697 | 0.479 | 0.323 | 1.753 | 2.161 |
| HC | E105H | 0.061 | 0.059 | 0.060 | 0.030 | 1.021 | 0.997 |
| HC | E105T | 1.103 | 0.655 | 0.751 | 0.385 | 1.469 | 1.701 |
| HC | F106L | 1.149 | 0.640 | 0.712 | 0.357 | 1.618 | 1.816 |
| HC | F106V | 0.308 | 0.111 | 0.185 | 0.095 | 1.667 | 1.174 |
| HC | F106W | 1.076 | 0.399 | 0.748 | 0.229 | 1.420 | 1.749 |
| HC | F106Y | 1.705 | 0.929 | 1.699 | 0.530 | 1.008 | 1.753 |
| HC | A107K | 1.095 | 0.652 | 1.061 | 0.377 | 1.033 | 1.732 |
| HC | A107H | 1.208 | 0.830 | 1.208 | 0.468 | 1.014 | 1.776 |
| HC | A107R | 1.354 | 0.832 | 1.162 | 0.485 | 1.165 | 1.717 |
| HC | A107L | 1.244 | 0.841 | 0.799 | 0.227 | 1.560 | 1.874 |
| HC | A107C | 1.069 | 0.566 | 0.842 | 0.322 | 1.277 | 1.762 |
| HC | A107D | 0.952 | 0.485 | 0.587 | 0.271 | 1.624 | 1.787 |
| HC | A107E | 1.049 | 0.755 | 0.787 | 0.378 | 1.332 | 1.997 |
| HC | A107G | 1.161 | 0.776 | 0.923 | 0.424 | 1.258 | 1.830 |
| HC | A107N | 0.990 | 0.567 | 1.035 | 0.316 | 0.995 | 1.799 |
| HC | A107S | 1.071 | 0.680 | 1.153 | 0.388 | 0.954 | 1.755 |
| HC | A107T | 1.141 | 0.615 | 0.851 | 0.358 | 1.343 | 1.723 |
| HC | A107Y | 1.368 | 0.802 | 1.121 | 0.422 | 1.230 | 1.898 |
| HC | Y108K | 0.930 | 0.266 | 0.448 | 0.150 | 2.076 | 1.776 |
| HC | Y108H | 2.023 | 1.102 | 1.597 | 0.598 | 1.266 | 1.838 |
| HC | Y108R | 0.516 | 0.173 | 0.275 | 0.106 | 1.883 | 1.631 |
| HC | Y108L | 1.518 | 0.635 | 1.024 | 0.297 | 1.482 | 2.139 |
| HC | Y108C | 0.802 | 0.311 | 0.481 | 0.170 | 1.666 | 1.829 |
| HC | Y108F | 1.934 | 1.187 | 1.760 | 0.635 | 1.100 | 1.872 |
| HC | Y108I | 1.534 | 0.703 | 1.061 | 0.367 | 1.446 | 1.927 |
| HC | Y108N | 1.536 | 0.719 | 0.918 | 0.368 | 1.674 | 1.958 |
| HC | Y108S | 1.438 | 0.676 | 0.905 | 0.307 | 1.589 | 2.209 |
| HC | Y108T | 1.482 | 0.672 | 0.905 | 0.298 | 1.644 | 2.254 |
| HC | Y108V | 0.434 | 0.157 | 0.229 | 0.098 | 1.900 | 1.607 |
| HC | Y108W | 1.845 | 0.938 | 1.154 | 0.430 | 1.604 | 2.185 |
| HC | W109I | 0.919 | 0.266 | 0.470 | 0.151 | 1.957 | 1.755 |
| HC | W109M | 1.162 | 0.442 | 0.865 | 0.232 | 1.346 | 1.903 |
| HC | W109Y | 0.994 | 0.323 | 0.593 | 0.177 | 1.676 | 1.832 |
| HC | G110R | 0.069 | 0.062 | 0.077 | 0.037 | 0.972 | 0.850 |
| HC | G110A | 1.937 | 0.839 | 1.589 | 0.541 | 1.229 | 1.552 |
| HC | G110M | 0.100 | 0.068 | 0.053 | 0.064 | 1.875 | 1.058 |
| HC | G110P | 0.234 | 0.099 | 0.142 | 0.078 | 1.652 | 1.279 |
| HC | G110T | 1.117 | 0.371 | 0.774 | 0.234 | 1.442 | 1.594 |
| HC | Q111K | 3.167 | 1.888 | 2.878 | 1.122 | 1.101 | 1.693 |
| HC | Q111H | 2.442 | 0.722 | 1.412 | 0.363 | 1.729 | 1.992 |
| HC | Q111R | 2.940 | 1.110 | 2.019 | 0.507 | 1.456 | 2.192 |
| HC | Q111L | 2.960 | 1.155 | 2.111 | 0.542 | 1.403 | 2.132 |
| HC | Q111D | 2.881 | 1.072 | 2.046 | 0.503 | 1.417 | 2.132 |
| HC | Q111E | 3.087 | 1.497 | 2.422 | 0.649 | 1.275 | 2.311 |
| HC | Q111G | 2.853 | 1.136 | 2.115 | 0.568 | 1.351 | 1.998 |
| HC | Q111M | 1.621 | 0.420 | 0.776 | 0.093 | 2.094 | 2.197 |
| HC | Q111P | 2.558 | 0.817 | 1.423 | 0.369 | 1.797 | 2.211 |
| HC | Q111S | 2.912 | 1.292 | 2.334 | 0.588 | 1.250 | 2.204 |
| HC | Q111T | 3.156 | 2.059 | 2.713 | 1.020 | 1.163 | 2.018 |
| HC | Q111V | 0.928 | 0.287 | 0.389 | 0.143 | 2.426 | 2.021 |
| HC | Q111W | 2.633 | 0.820 | 1.533 | 0.366 | 1.721 | 2.241 |
| HC | Q111Y | 2.705 | 1.111 | 1.891 | 0.506 | 1.431 | 2.192 |
| HC | G112A | 1.008 | 0.276 | 0.609 | 0.168 | 1.657 | 1.645 |
| HC | G112N | 0.152 | 0.218 | 0.120 | 0.074 | 1.269 | 1.075 |
| HC | G112P | 1.396 | 0.443 | 1.154 | 0.293 | 1.210 | 1.515 |
| HC | G112S | 0.774 | 0.208 | 0.537 | 0.142 | 1.442 | 1.462 |
| HC | G112T | 0.195 | 0.085 | 0.129 | 0.072 | 1.509 | 1.169 |
| HC | G112Y | 0.176 | 0.080 | 0.114 | 0.068 | 1.565 | 1.172 |
| LC | D1W | 2.925 | 1.768 | 2.617 | 0.583 | 1.124 | 1.594 |
| LC | I2C | 2.076 | 1.460 | 1.622 | 0.332 | 1.284 | 1.475 |
| LC | I2V | 2.520 | 1.080 | 1.908 | 0.530 | 1.326 | 2.054 |
| LC | I2W | 1.308 | 0.324 | 0.909 | 0.092 | 1.448 | 3.539 |
| LC | L3D | 0.977 | 0.280 | 0.481 | 0.149 | 2.031 | 1.898 |
| LC | L3F | 1.085 | 0.313 | 0.495 | 0.178 | 2.194 | 1.784 |
| LC | L3G | 3.056 | 2.119 | 3.021 | 0.406 | 1.015 | 2.677 |
| LC | L3S | 1.494 | 0.390 | 0.760 | 0.219 | 1.967 | 1.780 |
| LC | L3T | 2.433 | 0.850 | 1.908 | 0.396 | 1.276 | 2.157 |
| LC | L3V | 2.544 | 1.051 | 2.034 | 0.294 | 1.258 | 3.578 |
| LC | L3W | 2.342 | 0.652 | 1.239 | 0.313 | 1.891 | 2.088 |
| LC | L3Y | 2.522 | 0.894 | 1.958 | 0.476 | 1.310 | 1.881 |
| LC | L3R | 3.123 | 1.858 | 3.257 | 0.799 | 0.959 | 2.324 |
| LC | L4C | 1.277 | 0.354 | 0.511 | 0.172 | 2.500 | 2.065 |
| LC | L4E | 2.282 | 0.635 | 0.992 | 0.268 | 2.301 | 2.374 |
| LC | L4F | 0.666 | 0.196 | 0.257 | 0.105 | 2.595 | 1.876 |
| LC | L4I | 2.044 | 0.594 | 0.954 | 0.244 | 2.141 | 2.445 |
| LC | L4P | 1.034 | 0.288 | 0.434 | 0.143 | 2.387 | 2.025 |
| LC | L4S | 0.714 | 0.207 | 0.286 | 0.108 | 2.496 | 1.928 |
| LC | L4T | 1.397 | 0.383 | 0.540 | 0.163 | 2.594 | 2.343 |
| LC | L4V | 1.497 | 0.413 | 0.573 | 0.085 | 2.614 | 2.559 |
| LC | L4W | 0.867 | 0.225 | 0.331 | 0.115 | 2.626 | 1.962 |
| LC | L4K | 0.917 | 0.249 | 0.363 | 0.122 | 2.555 | 2.042 |
| LC | L4H | 1.168 | 0.298 | 0.395 | 0.139 | 2.948 | 2.152 |
| LC | L4R | 2.025 | 0.583 | 0.817 | 0.229 | 2.507 | 2.543 |
| LC | T5A | 2.306 | 1.577 | 1.307 | 0.268 | 1.768 | 2.845 |
| LC | T5C | 1.929 | 0.521 | 0.747 | 0.192 | 2.622 | 2.719 |
| LC | T5D | 2.275 | 0.814 | 1.408 | 0.289 | 1.615 | 2.818 |
| LC | T5E | 2.809 | 1.421 | 2.377 | 0.555 | 1.182 | 2.564 |
| LC | T5F | 2.403 | 0.890 | 1.568 | 0.351 | 1.532 | 2.537 |
| LC | T5G | 2.079 | 0.697 | 1.277 | 0.267 | 1.629 | 2.608 |
| LC | T5N | 2.438 | 0.947 | 1.721 | 0.363 | 1.417 | 2.609 |
| LC | T5P | 1.226 | 0.364 | 0.584 | 0.171 | 2.098 | 2.127 |
| LC | T5S | 2.515 | 0.908 | 1.421 | 0.320 | 1.772 | 2.843 |
| LC | T5W | 2.195 | 0.701 | 1.131 | 0.246 | 1.943 | 2.854 |
| LC | T5L | 2.512 | 1.262 | 2.186 | 0.525 | 1.149 | 2.405 |
| LC | T5K | 2.558 | 0.944 | 1.638 | 0.370 | 1.562 | 2.556 |
| LC | T5H | 2.800 | 1.163 | 1.669 | 0.355 | 1.678 | 3.277 |
| LC | T5R | 2.633 | 1.328 | 1.846 | 0.423 | 1.428 | 3.143 |
| LC | R24A | 2.819 | 1.801 | 2.525 | 0.751 | 1.119 | 2.406 |
| LC | R24C | 2.004 | 0.612 | 1.021 | 0.249 | 1.965 | 2.460 |
| LC | R24F | 2.121 | 0.749 | 1.259 | 0.288 | 1.688 | 2.605 |
| LC | R24G | 1.023 | 0.297 | 0.396 | 0.133 | 2.599 | 2.237 |
| LC | R24L | 2.886 | 1.764 | 2.615 | 0.748 | 1.104 | 2.372 |
| LC | R24M | 2.880 | 2.141 | 2.619 | 0.562 | 1.100 | 1.749 |
| LC | R24S | 2.443 | 0.980 | 1.621 | 0.365 | 1.508 | 2.689 |
| LC | R24W | 2.019 | 0.655 | 1.111 | 0.261 | 1.816 | 2.512 |
| LC | R24Y | 2.557 | 1.315 | 2.221 | 0.545 | 1.152 | 2.413 |
| LC | A25C | 2.233 | 0.712 | 1.754 | 0.334 | 1.275 | 2.130 |
| LC | A25G | 2.406 | 1.123 | 2.373 | 0.568 | 1.014 | 1.986 |
| LC | A25L | 1.794 | 0.494 | 1.182 | 0.240 | 1.534 | 2.063 |
| LC | A25V | 2.351 | 1.883 | 1.718 | 0.463 | 1.370 | 1.926 |
| LC | S26A | 2.032 | 0.623 | 1.194 | 0.320 | 1.703 | 1.949 |
| LC | S26C | 1.490 | 0.370 | 0.672 | 0.204 | 2.232 | 1.814 |
| LC | S26D | 1.076 | 1.362 | 0.504 | 0.199 | 2.140 | 1.689 |
| LC | S26I | 1.847 | 0.549 | 1.137 | 0.297 | 1.642 | 1.850 |
| LC | S26M | 1.882 | 0.511 | 0.944 | 0.271 | 1.999 | 1.920 |
| LC | S26N | 2.649 | 1.069 | 2.006 | 0.472 | 1.325 | 2.269 |
| LC | S26V | 1.023 | 0.318 | 0.487 | 0.181 | 2.104 | 1.778 |
| LC | S26W | 1.416 | 0.394 | 0.640 | 0.211 | 2.215 | 1.871 |
| LC | S26L | 2.514 | 0.892 | 1.679 | 0.460 | 1.498 | 1.938 |
| LC | S26G | 2.563 | 1.076 | 1.773 | 0.470 | 1.448 | 2.293 |
| LC | S26H | 2.686 | 1.429 | 2.620 | 0.764 | 1.029 | 1.871 |
| LC | S26R | 0.578 | 0.206 | 0.310 | 0.166 | 1.869 | 1.245 |
| LC | Q27A | 2.910 | 1.942 | 2.602 | 0.970 | 1.118 | 2.002 |
| LC | Q27D | 2.850 | 1.856 | 2.682 | 0.962 | 1.064 | 1.940 |
| LC | Q27E | 2.980 | 1.656 | 2.752 | 0.774 | 1.084 | 2.141 |
| LC | Q27F | 3.022 | 1.396 | 2.597 | 0.684 | 1.164 | 2.044 |
| LC | Q27I | 3.166 | 2.049 | 2.605 | 1.092 | 1.216 | 1.881 |
| LC | Q27M | 3.076 | 1.975 | 2.485 | 0.917 | 1.243 | 2.153 |
| LC | Q27N | 2.816 | 1.768 | 2.563 | 0.976 | 1.099 | 1.811 |
| LC | Q27P | 1.967 | 1.368 | 1.815 | 0.645 | 1.128 | 2.123 |
| LC | Q27T | 3.165 | 2.567 | 2.919 | 0.861 | 1.085 | 1.506 |
| LC | S28A | 2.339 | 0.741 | 1.315 | 0.353 | 1.779 | 2.100 |
| LC | S28D | 2.972 | 1.878 | 2.403 | 0.971 | 1.268 | 1.964 |
| LC | S28N | 3.165 | 2.818 | 3.278 | 1.196 | 0.966 | 1.114 |
| LC | S28Q | 2.869 | 1.140 | 2.247 | 0.527 | 1.277 | 2.168 |
| LC | S28L | 1.871 | 0.518 | 1.004 | 0.256 | 1.859 | 2.022 |
| LC | S28K | 2.492 | 0.759 | 1.663 | 0.411 | 1.499 | 1.871 |
| LC | S28H | 2.843 | 1.108 | 2.146 | 0.484 | 1.325 | 2.293 |
| LC | I29A | 2.899 | 1.699 | 2.373 | 0.947 | 1.222 | 1.796 |
| LC | I29E | 2.217 | 0.833 | 1.193 | 0.437 | 1.862 | 1.908 |
| LC | I29F | 2.761 | 1.091 | 1.913 | 0.613 | 1.444 | 1.781 |
| LC | I29S | 2.910 | 1.745 | 1.779 | 0.627 | 1.742 | 3.037 |
| LC | I29T | 2.967 | 1.544 | 2.317 | 0.796 | 1.282 | 1.944 |
| LC | I29R | 0.124 | 1.528 | 0.294 | 0.140 | 0.422 | 0.673 |
| LC | G30A | 2.660 | 1.192 | 2.154 | 0.626 | 1.236 | 1.905 |
| LC | G30E | 3.158 | 1.981 | 2.865 | 1.070 | 1.109 | 1.852 |
| LC | G30F | 2.951 | 1.136 | 2.046 | 0.474 | 1.442 | 2.408 |
| LC | G30I | 2.653 | 1.210 | 2.221 | 0.642 | 1.195 | 1.885 |
| LC | G30M | 3.077 | 1.589 | 2.595 | 0.864 | 1.189 | 1.841 |
| LC | G30P | 2.643 | 1.034 | 1.826 | 0.541 | 1.447 | 1.911 |
| LC | G30Q | 2.855 | 1.151 | 2.261 | 0.608 | 1.263 | 1.895 |
| LC | G30S | 2.918 | 1.562 | 2.272 | 0.708 | 1.284 | 2.213 |
| LC | G30V | 2.539 | 0.882 | 1.477 | 0.406 | 1.720 | 2.172 |
| LC | G30Y | 2.270 | 0.630 | 1.137 | 0.244 | 1.998 | 2.586 |
| LC | G30L | 3.075 | 1.525 | 2.530 | 0.351 | 1.216 | 2.155 |
| LC | G30K | 2.747 | 0.945 | 1.681 | 0.385 | 1.634 | 2.456 |
| LC | G30H | 2.864 | 1.080 | 2.184 | 0.577 | 1.317 | 1.874 |
| LC | G30R | 2.634 | 1.078 | 2.126 | 0.529 | 1.239 | 2.041 |
| LC | T31A | 3.109 | 1.829 | 2.594 | 0.794 | 1.202 | 2.305 |
| LC | T31F | 2.585 | 1.954 | 1.545 | 0.378 | 1.673 | 2.444 |
| LC | T31G | 3.135 | 1.900 | 2.537 | 0.908 | 1.236 | 2.093 |
| LC | T31M | 3.168 | 2.090 | 2.724 | 0.921 | 1.163 | 2.270 |
| LC | T31S | 3.017 | 1.525 | 2.487 | 0.796 | 1.213 | 1.916 |
| LC | T31V | 3.059 | 1.618 | 2.684 | 0.843 | 1.140 | 1.923 |
| LC | T31W | 2.825 | 1.133 | 1.755 | 0.480 | 1.639 | 2.359 |
| LC | T31L | 2.910 | 1.274 | 2.135 | 0.647 | 1.365 | 1.969 |
| LC | T31K | 3.195 | 2.263 | 2.923 | 1.161 | 1.093 | 1.949 |
| LC | T31H | 3.172 | 2.169 | 3.026 | 1.098 | 1.049 | 1.976 |
| LC | N32G | 2.507 | 2.003 | 2.318 | 0.992 | 1.081 | 1.057 |
| LC | I33F | 2.150 | 0.712 | 1.647 | 0.362 | 1.306 | 1.971 |
| LC | I33G | 0.497 | 0.726 | 0.321 | 0.122 | 1.552 | 1.396 |
| LC | I33M | 2.452 | 0.922 | 1.788 | 0.471 | 1.391 | 1.957 |
| LC | I33T | 2.308 | 0.841 | 1.714 | 0.447 | 1.351 | 1.880 |
| LC | I33V | 2.684 | 1.395 | 2.296 | 0.674 | 1.171 | 2.089 |
| LC | I33H | 0.520 | 0.162 | 0.305 | 0.101 | 1.707 | 1.603 |
| LC | I48M | 3.195 | 2.000 | 2.971 | 0.998 | 1.076 | 2.004 |
| LC | I48S | 2.486 | 1.520 | 2.469 | 0.741 | 1.007 | 1.037 |
| LC | I48L | 3.126 | 1.720 | 2.560 | 0.804 | 1.221 | 2.142 |
| LC | I48K | 3.092 | 1.618 | 2.624 | 0.785 | 1.180 | 2.062 |
| LC | K49A | 3.111 | 2.465 | 3.143 | 1.634 | 0.990 | 1.508 |
| LC | K49E | 2.831 | 1.362 | 2.504 | 0.999 | 1.136 | 1.374 |
| LC | K49F | 2.953 | 1.733 | 2.622 | 0.910 | 1.126 | 1.904 |
| LC | K49G | 3.059 | 2.388 | 3.056 | 1.493 | 1.001 | 1.602 |
| LC | K49N | 2.967 | 2.078 | 2.833 | 1.037 | 1.048 | 2.009 |
| LC | K49Q | 3.070 | 2.336 | 2.908 | 1.708 | 1.058 | 1.376 |
| LC | K49S | 3.179 | 2.802 | 3.199 | 1.890 | 0.994 | 1.485 |
| LC | K49T | 3.161 | 2.528 | 3.076 | 1.343 | 1.028 | 1.884 |
| LC | K49V | 3.087 | 1.831 | 2.694 | 0.947 | 1.145 | 1.934 |
| LC | K49Y | 2.948 | 1.490 | 2.252 | 0.699 | 1.309 | 2.130 |
| LC | K49L | 2.767 | 2.365 | 2.614 | 1.220 | 1.060 | 1.459 |
| LC | K49H | 3.068 | 1.734 | 2.749 | 0.736 | 1.116 | 2.356 |
| LC | K49R | 3.091 | 2.911 | 3.020 | 2.277 | 1.023 | 1.278 |
| LC | A51T | 2.711 | 1.309 | 1.762 | 0.477 | 1.541 | 2.749 |
| LC | A51L | 2.611 | 1.889 | 2.090 | 0.781 | 1.250 | 1.595 |
| LC | S52A | 3.173 | 2.440 | 2.815 | 0.622 | 1.130 | 2.031 |
| LC | S52C | 2.145 | 0.676 | 1.079 | 0.250 | 1.995 | 2.709 |
| LC | S52D | 3.127 | 2.159 | 2.649 | 0.884 | 1.180 | 2.446 |
| LC | S52E | 2.874 | 1.773 | 2.495 | 0.691 | 1.152 | 2.569 |
| LC | S52G | 2.398 | 0.920 | 1.424 | 0.356 | 1.692 | 2.585 |
| LC | S52I | 2.301 | 0.928 | 1.450 | 0.358 | 1.599 | 2.598 |
| LC | S52M | 2.462 | 0.880 | 1.489 | 0.312 | 1.668 | 2.833 |
| LC | S52Q | 2.678 | 1.044 | 1.825 | 0.409 | 1.471 | 2.562 |
| LC | S52V | 2.799 | 1.545 | 2.259 | 0.639 | 1.240 | 2.420 |
| LC | S52W | 2.632 | 1.007 | 1.620 | 0.386 | 1.632 | 2.623 |
| LC | S52R | 3.133 | 1.934 | 2.294 | 0.746 | 1.367 | 2.604 |
| LC | S52K | 3.028 | 1.494 | 1.964 | 0.510 | 1.542 | 2.954 |
| LC | E53G | 0.182 | 0.173 | 0.122 | 0.076 | 1.605 | 1.489 |
| LC | S54M | 2.365 | 2.496 | 2.846 | 1.362 | 0.831 | 1.427 |
| LC | I55A | 2.591 | 1.923 | 2.689 | 0.728 | 0.964 | 1.318 |
| LC | I55F | 2.450 | 1.521 | 2.503 | 0.781 | 0.980 | 1.950 |
| LC | S56G | 3.158 | 2.562 | 2.991 | 1.497 | 1.056 | 1.719 |
| LC | S56L | 3.088 | 2.195 | 2.849 | 1.078 | 1.084 | 2.042 |
| LC | S56A | 3.072 | 2.332 | 3.031 | 1.328 | 1.015 | 1.759 |
| LC | S56C | 2.974 | 1.448 | 2.383 | 0.328 | 1.250 | 2.158 |
| LC | S56D | 3.060 | 1.994 | 2.841 | 1.165 | 1.077 | 1.711 |
| LC | S56E | 3.130 | 2.431 | 2.972 | 1.482 | 1.053 | 1.642 |
| LC | S56F | 3.095 | 2.008 | 2.961 | 1.102 | 1.046 | 1.824 |
| LC | S56N | 3.043 | 2.136 | 3.044 | 1.188 | 1.000 | 1.804 |
| LC | S56P | 3.120 | 2.744 | 3.119 | 2.194 | 1.000 | 1.251 |
| LC | S56Q | 3.136 | 2.242 | 2.999 | 1.207 | 1.046 | 1.858 |
| LC | S56V | 3.034 | 2.233 | 2.949 | 1.338 | 1.029 | 1.671 |
| LC | S56W | 3.044 | 1.944 | 2.720 | 0.978 | 1.119 | 1.988 |
| LC | S56H | 0.132 | 0.088 | 0.100 | 0.094 | 1.309 | 0.932 |
| LC | S56R | 3.035 | 1.896 | 2.681 | 0.952 | 1.132 | 1.992 |
| LC | S56K | 3.126 | 2.375 | 2.994 | 1.459 | 1.044 | 1.629 |
| LC | Y86F | 0.314 | 0.106 | 0.176 | 0.083 | 1.789 | 1.291 |
| LC | Y86M | 0.265 | 0.095 | 0.152 | 0.077 | 1.751 | 1.235 |
| LC | Y86H | 0.454 | 0.140 | 0.259 | 0.046 | 1.754 | 1.475 |
| LC | Y87L | 1.364 | 0.391 | 0.662 | 0.189 | 2.060 | 2.070 |
| LC | Y87C | 2.233 | 0.766 | 1.316 | 0.354 | 1.697 | 2.169 |
| LC | Y87D | 0.692 | 0.193 | 0.295 | 0.114 | 2.345 | 1.700 |
| LC | Y87F | 2.372 | 1.681 | 2.434 | 1.000 | 0.981 | 1.709 |
| LC | Y87G | 0.941 | 0.252 | 0.344 | 0.118 | 2.738 | 2.145 |
| LC | Y87I | 2.941 | 1.874 | 2.773 | 0.977 | 1.061 | 1.917 |
| LC | Y87N | 1.369 | 0.921 | 0.571 | 0.166 | 2.397 | 2.199 |
| LC | Y87P | 0.697 | 0.195 | 0.358 | 0.144 | 1.947 | 1.353 |
| LC | Y87S | 2.337 | 0.880 | 1.488 | 0.387 | 1.571 | 2.273 |
| LC | Y87T | 2.232 | 0.926 | 1.739 | 0.533 | 1.283 | 1.746 |
| LC | Y87V | 2.621 | 1.571 | 2.360 | 0.730 | 1.110 | 2.155 |
| LC | Y87W | 2.260 | 1.231 | 2.159 | 0.739 | 1.046 | 1.667 |
| LC | Y87K | 1.493 | 0.385 | 0.700 | 0.207 | 2.137 | 1.860 |
| LC | Y87H | 0.295 | 0.118 | 0.194 | 0.104 | 1.522 | 1.132 |
| LC | Y87R | 1.711 | 0.562 | 0.997 | 0.296 | 1.716 | 1.949 |
| LC | Q89E | 2.195 | 0.799 | 1.637 | 0.441 | 1.342 | 1.815 |
| LC | N91L | 0.334 | 0.124 | 0.162 | 0.087 | 2.064 | 1.421 |
| LC | N91A | 2.624 | 2.060 | 2.319 | 1.753 | 1.131 | 1.182 |
| LC | N91C | 2.633 | 1.226 | 2.163 | 0.790 | 1.219 | 1.553 |
| LC | N91I | 2.911 | 1.849 | 2.630 | 0.571 | 1.108 | 1.607 |
| LC | N91M | 2.428 | 1.480 | 2.182 | 1.132 | 1.114 | 1.308 |
| LC | N91S | 2.994 | 2.783 | 2.760 | 2.387 | 1.085 | 1.166 |
| LC | N91T | 2.831 | 1.991 | 2.546 | 1.387 | 1.113 | 1.435 |
| LC | N91V | 2.740 | 1.978 | 2.498 | 1.686 | 1.098 | 1.173 |
| LC | N91H | 2.919 | 1.694 | 2.691 | 0.876 | 1.085 | 1.940 |
| LC | N91R | 0.097 | 0.080 | 0.083 | 0.075 | 1.159 | 1.056 |
| LC | N92C | 2.942 | 1.540 | 2.633 | 1.142 | 1.118 | 1.349 |
| LC | N92D | 3.181 | 2.318 | 2.980 | 1.686 | 1.067 | 1.375 |
| LC | N92L | 2.733 | 1.469 | 2.812 | 0.741 | 0.972 | 1.983 |
| LC | N92M | 2.853 | 1.874 | 2.849 | 0.876 | 1.002 | 2.139 |
| LC | N92S | 2.560 | 1.897 | 2.199 | 1.094 | 1.165 | 1.733 |
| LC | N92T | 2.583 | 2.056 | 2.586 | 1.336 | 0.997 | 1.551 |
| LC | N92V | 3.125 | 2.740 | 3.058 | 1.851 | 1.022 | 1.484 |
| LC | N92W | 2.147 | 1.772 | 1.969 | 1.546 | 1.092 | 1.146 |
| LC | N92Y | 2.125 | 0.636 | 1.703 | 0.477 | 1.248 | 1.332 |
| LC | N92H | 3.094 | 2.440 | 2.804 | 1.941 | 1.103 | 1.257 |
| LC | N92K | 2.429 | 0.625 | 2.546 | 0.519 | 0.955 | 2.118 |
| LC | N92R | 3.085 | 1.643 | 2.966 | 0.691 | 1.040 | 2.377 |
| LC | N93T | 0.197 | 0.094 | 0.192 | 0.048 | 1.029 | 1.021 |
| LC | T96L | 3.174 | 1.793 | 2.779 | 0.701 | 1.176 | 2.936 |
| LC | T96C | 2.941 | 1.378 | 2.394 | 0.699 | 1.230 | 1.972 |
| LC | T96M | 2.899 | 1.972 | 2.673 | 0.834 | 1.084 | 1.673 |
| LC | T96V | 3.101 | 1.774 | 3.006 | 0.936 | 1.032 | 1.898 |
| LC | T97L | 2.411 | 0.799 | 1.773 | 0.399 | 1.366 | 2.004 |
| LC | T97A | 2.794 | 1.273 | 3.309 | 0.332 | 0.845 | 1.954 |
| LC | T97D | 1.749 | 0.461 | 1.007 | 0.237 | 1.737 | 1.951 |
| LC | T97G | 1.691 | 0.521 | 1.423 | 0.276 | 1.190 | 1.888 |
| LC | T97Q | 2.618 | 1.004 | 2.602 | 0.537 | 1.005 | 1.869 |
| LC | T97S | 2.108 | 0.545 | 1.884 | 0.260 | 1.119 | 2.095 |
| LC | T97V | 2.316 | 0.998 | 2.021 | 0.517 | 1.151 | 1.935 |
| LC | T97K | 2.211 | 0.892 | 2.542 | 0.491 | 0.870 | 1.816 |
| LC | T97R | 0.542 | 0.180 | 0.282 | 0.127 | 1.922 | 1.420 |
| LC | F98A | 0.999 | 0.296 | 0.635 | 0.096 | 1.573 | 1.537 |
| LC | F98M | 2.228 | 0.686 | 1.414 | 0.431 | 1.582 | 1.600 |
| LC | F98S | 1.532 | 0.467 | 1.079 | 0.299 | 1.422 | 1.560 |
| LC | F98V | 1.895 | 0.533 | 1.161 | 0.315 | 1.645 | 1.699 |
| LC | F98Y | 2.871 | 1.365 | 2.439 | 0.785 | 1.177 | 1.738 |
| LC | G99L | 0.578 | 0.164 | 0.310 | 0.096 | 1.864 | 1.713 |
| LC | G99D | 0.521 | 0.132 | 0.308 | 0.088 | 1.692 | 1.498 |
| LC | G99E | 0.496 | 0.166 | 0.300 | 0.126 | 1.655 | 1.324 |
| LC | G99F | 0.583 | 0.183 | 0.255 | 0.094 | 2.288 | 1.940 |
| LC | G99I | 0.480 | 0.141 | 0.293 | 0.100 | 1.645 | 1.420 |
| LC | G99M | 0.599 | 0.182 | 0.291 | 0.111 | 2.057 | 1.640 |
| LC | G99N | 0.611 | 0.154 | 0.373 | 0.124 | 1.639 | 1.235 |
| LC | G99S | 1.517 | 0.525 | 1.365 | 0.236 | 1.112 | 2.226 |
| LC | G99T | 1.203 | 0.307 | 0.812 | 0.173 | 1.488 | 1.783 |
| LC | G99V | 0.701 | 0.186 | 0.431 | 0.105 | 1.631 | 1.768 |
| LC | G99K | 0.360 | 0.120 | 0.203 | 0.042 | 1.793 | 1.481 |
| LC | G99H | 0.496 | 0.126 | 0.346 | 0.069 | 1.440 | 1.831 |
| LC | Q100C | 2.836 | 1.308 | 2.238 | 0.619 | 1.278 | 2.113 |
| LC | Q100D | 3.035 | 2.136 | 3.057 | 1.429 | 0.993 | 1.495 |
| LC | Q100E | 2.932 | 1.985 | 2.880 | 1.120 | 1.018 | 1.773 |
| LC | Q100F | 3.039 | 2.002 | 2.863 | 1.155 | 1.061 | 1.736 |
| LC | Q100I | 2.917 | 1.641 | 2.727 | 0.974 | 1.070 | 1.685 |
| LC | Q100M | 3.079 | 1.799 | 2.753 | 1.005 | 1.119 | 1.802 |
| LC | Q100N | 3.113 | 2.782 | 3.138 | 2.163 | 0.992 | 1.287 |
| LC | Q100P | 3.072 | 2.357 | 3.146 | 1.497 | 0.977 | 1.575 |
| LC | Q100T | 3.064 | 2.278 | 2.950 | 0.612 | 1.039 | 1.778 |
| LC | Q100V | 3.095 | 2.148 | 2.942 | 1.292 | 1.052 | 1.671 |
| LC | Q100W | 2.873 | 1.702 | 2.757 | 0.853 | 1.043 | 2.000 |
| LC | Q100Y | 3.170 | 2.395 | 3.173 | 1.671 | 0.999 | 1.439 |
| LC | Q100K | 3.076 | 2.031 | 2.852 | 1.110 | 1.078 | 1.834 |
| LC | Q100H | 3.096 | 2.050 | 2.942 | 1.261 | 1.053 | 1.628 |
| LC | Q100R | 2.930 | 1.902 | 2.831 | 1.030 | 1.035 | 1.846 |

^{a}HC = Heavy Chain; LC = Light Chain
^{b}V = variable

[1023] b. Determining Antibody Concentration

[1024] The antibody concentration was determined by anti-EGFR antibody quantitation ELISA. Briefly, plates were coated with 100 μL sEGFR-H6 (Sino Biologicals Inc, Cat#10001-H08H) antigen at 12 nM (1.32ug/mL) in PBS; washed three times with 250 μl/well of PBS; and blocked for 1 hour at room temperature with 250 μl of PBS with 5 mg/mL BSA. Serial dilutions of anti-EGFR-FLAG antibody standards (protein A column purified) were prepared in PBS with 5 mg/mL BSA. The starting antibody concentration was 100 ng/mL followed by 1:3 dilutions as specified. Test sample dilutions were prepared (1:3 dilutions), and 100 μl/well of standard and test sample were added to wells and incubated at room temperature for 1 hr. Plates were washed 3× with 250 μl/well of PBS with 5 mg/mL BSA. 100 μL/well rabbit anti-human IgG-Fc-HRP was added at 1:5000 (final concentration 0.2 μL/mL) dilution in PBS/5 mg/mL BSA. The plate was incubated for 1 hr at RT; washed 3× with 250 μl/well of PBS/5 mg/mL BSA. TMB Substrate was added and plates were read as described above.

[1025] c. Calculating Specific Activity

[1026] The specific activity (SA) was calculated by dividing the average OD value by the antibody concentration. The specific activity was then normalized to give a normalized specific activity (NSA) for each variant by dividing the specific activity of the variant anti-EGFR antibody by the specific activity of the reference FLAG-tagged anti-EGFR parental antibody. Table 33 sets forth the normalized specific activity of each identified variant set forth above at dilution 1 and dilution 2. The variant anti-EGFR antibodies with an NSA>0.4 at pH 6.0 and an NSA<0.4 at pH 7.4 were identified and selected for further analysis. The mutations of these identified antibodies are antibodies containing light chain (LC) mutations: L004C, L004V, S056H or N091V; and antibodies containing heavy chain (HC) mutations: V024I, V024L, S025C, S025G, S025I, S025Q, S025T, S025L, N031I, N031T, N031V, Y032seT, V050L, G054R, G054C, G054P, D058M, Y059E, F063R, F063C, F063G, F063M, F063V, T064N, T064V, S068F, S068Q, D072K, D072L, D072M, D072W, N073Q, S074H, S074R, S074D, S074G, S074Y, K075H, K075W, Q077R, Q077E, T100I, T100P, Y101W, Y104D, Y104F, Y104S or A107N.

TABLE 33
Normalized Specific Activity at pH 6.0 and
pH 7.4 of Variant Anti-EGFR Antibodies.

| | | Normalized Specific | | Normalized Specific | |
|---|---|---|---|---|---|
| | | Activity (NSA) (pH 6.0) | | Activity (NSA) (pH 7.4) | |
| Chain^{a} | Mutation | Dilution 1 | Dilution 2 | Dilution 1 | Dilution 2 |
| HC | T23K | 1.020 | 2.018 | 0.986 | 1.435 |
| HC | T23H | 1.889 | 5.343 | 1.940 | 3.453 |
| HC | T23R | 1.057 | 2.664 | 1.048 | 1.587 |
| HC | T23A | 1.238 | 2.459 | 1.304 | 1.297 |
| HC | T23C | 1.073 | 2.651 | 1.096 | 1.673 |
| HC | T23E | 1.255 | 2.947 | 1.406 | 1.751 |
| HC | T23G | 1.057 | 1.084 | 0.727 | 0.627 |
| HC | T23I | 1.097 | 2.851 | 1.126 | 1.975 |
| HC | T23M | 0.546 | 0.946 | 0.494 | 0.702 |
| HC | T23N | 1.062 | 2.207 | 0.888 | 1.504 |
| HC | T23P | 0.118 | 0.235 | 0.079 | 0.273 |
| HC | T23S | 0.750 | 2.908 | 1.087 | 1.902 |
| HC | T23V | 0.117 | 0.329 | 0.097 | 0.290 |
| HC | T23W | 3.143 | 5.871 | 2.981 | 2.441 |
| HC | T23L | 3.495 | 3.868 | 2.889 | 2.277 |
| HC | V24R | 0.103 | 0.096 | 0.092 | 0.413 |
| HC | V24A | 0.600 | 0.307 | 0.439 | 0.525 |
| HC | V24F | 0.861 | 0.233 | 0.428 | 0.622 |
| HC | V24G | 0.525 | 0.323 | 0.461 | 0.614 |
| HC | V24I | 1.049 | 0.305 | 0.381 | 0.568 |
| HC | V24M | 1.007 | 0.348 | 0.490 | 0.653 |
| HC | V24P | 2.209 | 0.566 | 0.766 | 1.234 |
| HC | V24S | 0.657 | 0.337 | 0.460 | 0.581 |
| HC | V24T | 1.001 | 0.315 | 0.430 | 0.543 |
| HC | V24L | 0.551 | 0.176 | 0.145 | 0.245 |
| HC | S25H | 0.389 | 0.227 | 0.167 | 0.207 |
| HC | S25R | 0.397 | 0.175 | 0.237 | 0.255 |
| HC | S25A | 0.344 | 0.239 | 0.238 | 0.310 |
| HC | S25C | 0.564 | 0.262 | 0.365 | 0.423 |
| HC | S25D | 0.364 | 0.203 | 0.267 | 0.351 |
| HC | S25E | 0.365 | 0.142 | 0.321 | 0.400 |
| HC | S25F | 0.350 | 0.196 | 0.323 | 0.450 |
| HC | S25G | 0.573 | 0.237 | 0.228 | 0.317 |
| HC | S25I | 0.556 | 0.397 | 0.374 | 0.464 |
| HC | S25M | 0.320 | 0.248 | 0.288 | 0.394 |
| HC | S25P | 2.362 | 0.630 | 0.673 | 1.444 |
| HC | S25Q | 1.319 | 0.347 | 0.335 | 0.493 |
| HC | S25T | 0.648 | 0.118 | 0.353 | 0.192 |
| HC | S25V | 0.300 | 0.229 | 0.221 | 0.381 |
| HC | S25L | 0.504 | 0.283 | 0.267 | 0.361 |
| HC | G26H | 2.071 | 3.143 | 1.536 | 2.105 |
| HC | G26R | 1.821 | 2.842 | 1.633 | 1.911 |
| HC | G26D | 1.456 | 2.488 | 1.123 | 1.696 |
| HC | G26F | 0.672 | 1.242 | 0.444 | 0.925 |
| HC | G26M | 1.674 | 2.875 | 1.284 | 1.905 |
| HC | G26N | 0.705 | 2.325 | 0.858 | 1.765 |
| HC | G26P | 1.501 | 3.333 | 1.883 | 2.791 |
| HC | G26Q | 1.275 | 2.310 | 1.208 | 1.657 |
| HC | G26S | 1.298 | 2.234 | 1.322 | 1.625 |
| HC | G26Y | 1.638 | 2.491 | 1.170 | 1.692 |
| HC | G26L | 4.237 | 6.512 | 3.218 | 5.644 |
| HC | F27H | 1.267 | 0.291 | 0.713 | 1.059 |
| HC | F27R | 1.285 | 0.810 | 0.747 | 1.151 |
| HC | F27A | 0.643 | 0.485 | 0.504 | 0.864 |
| HC | F27D | 0.572 | 0.335 | 0.513 | 0.984 |
| HC | F27E | 0.500 | 0.234 | 0.444 | 0.836 |
| HC | F27G | 0.777 | 0.718 | 0.522 | 0.808 |
| HC | F27M | 0.723 | 0.304 | 0.501 | 0.512 |
| HC | F27P | 0.834 | 0.293 | 0.506 | 0.790 |
| HC | F27Q | 0.872 | 0.500 | 0.630 | 0.890 |
| HC | F27S | 1.248 | 0.334 | 0.620 | 0.852 |
| HC | F27T | 0.710 | 0.311 | 0.482 | 0.681 |
| HC | F27V | 1.758 | 0.882 | 0.781 | 1.205 |
| HC | F27W | 1.371 | 0.344 | 0.639 | 0.972 |
| HC | F27Y | 0.857 | 0.278 | 0.409 | 0.493 |
| HC | F27L | 0.813 | 0.256 | 0.523 | 0.800 |
| HC | S28K | 0.671 | 2.281 | 0.757 | 1.520 |
| HC | S28H | 1.188 | 2.106 | 0.969 | 1.332 |
| HC | S28R | 0.978 | 2.223 | 1.022 | 1.669 |
| HC | S28A | 1.412 | 2.739 | 1.162 | 1.534 |
| HC | S28D | 0.602 | 1.096 | 0.437 | 0.700 |
| HC | S28I | 1.363 | 3.128 | 1.289 | 1.859 |
| HC | S28M | 2.402 | 4.485 | 2.098 | 3.151 |
| HC | S28P | 1.701 | 3.628 | 1.498 | 2.339 |
| HC | S28Q | 1.048 | 2.480 | 1.030 | 1.642 |
| HC | S28V | 0.972 | 2.638 | 1.049 | 1.913 |
| HC | S28W | 0.814 | 2.190 | 0.823 | 1.423 |
| HC | S28L | 2.175 | 8.593 | 1.970 | 2.977 |
| HC | L29K | 0.392 | 1.111 | 0.282 | 0.698 |
| HC | L29H | 0.338 | 0.911 | 0.238 | 0.475 |
| HC | L29A | 1.181 | 2.332 | 1.142 | 1.769 |
| HC | L29D | 0.388 | 0.893 | 0.359 | 0.897 |
| HC | L29G | 2.475 | 3.360 | 2.240 | 3.922 |
| HC | L29I | 0.406 | 1.498 | 0.517 | 1.142 |
| HC | L29M | 1.067 | 2.477 | 1.252 | 2.170 |
| HC | L29N | 0.845 | 3.909 | 0.860 | 2.538 |
| HC | L29S | 0.684 | 1.545 | 0.497 | 1.088 |
| HC | L29V | 0.352 | 0.930 | 0.278 | 0.735 |
| HC | T30H | 1.092 | 2.120 | 1.109 | 1.430 |
| HC | T30R | 0.592 | 1.454 | 0.718 | 0.994 |
| HC | T30D | 1.159 | 2.336 | 1.122 | 1.588 |
| HC | T30G | 0.749 | 1.508 | 0.822 | 1.140 |
| HC | T30I | 1.025 | 2.917 | 1.082 | 1.502 |
| HC | T30M | 0.700 | 1.280 | 0.797 | 0.834 |
| HC | T30N | 1.065 | 1.917 | 1.093 | 1.311 |
| HC | T30P | 1.064 | 1.607 | 0.996 | 1.397 |
| HC | T30S | 0.786 | 1.636 | 0.929 | 1.233 |
| HC | T30V | 0.728 | 1.567 | 0.912 | 0.991 |
| HC | T30W | 1.003 | 1.900 | 0.927 | 1.169 |
| HC | T30Y | 0.708 | 1.688 | 0.797 | 1.561 |
| HC | N31K | 0.352 | 0.248 | 0.253 | 0.400 |
| HC | N31H | 0.317 | 0.212 | 0.201 | 0.280 |
| HC | N31D | 0.794 | 0.331 | 0.483 | 0.587 |
| HC | N31E | 0.203 | 0.184 | 0.173 | 0.517 |
| HC | N31G | 0.506 | 0.301 | 0.414 | 0.613 |
| HC | N31I | 0.933 | 0.303 | 0.333 | 0.435 |
| HC | N31T | 0.503 | 0.125 | 0.370 | 0.472 |
| HC | N31V | 0.763 | 0.281 | 0.318 | 0.197 |
| HC | N31L | 0.659 | 0.222 | 0.461 | 0.665 |
| HC | Y32H | 0.609 | 1.470 | 0.552 | 1.002 |
| HC | Y32R | 0.943 | 1.707 | 1.059 | 1.413 |
| HC | Y32C | 0.703 | 1.348 | 0.573 | 1.284 |
| HC | Y32M | 0.878 | 1.559 | 0.859 | 1.345 |
| HC | Y32N | 0.500 | 1.335 | 0.420 | 0.483 |
| HC | Y32T | 0.455 | 0.953 | 0.376 | 0.759 |
| HC | Y32V | 0.742 | 1.043 | 0.672 | 1.448 |
| HC | Y32L | 1.385 | 2.612 | 1.287 | 1.974 |
| HC | G33E | 1.207 | 2.300 | 0.931 | 0.950 |
| HC | G33M | 2.556 | 3.457 | 1.992 | 2.807 |
| HC | G33S | 0.801 | 3.041 | 0.790 | 2.418 |
| HC | G33T | 1.148 | 1.830 | 0.970 | 1.767 |
| HC | G33Y | 1.133 | 4.983 | 1.165 | 4.590 |
| HC | V34A | 2.444 | 4.254 | 1.716 | 3.125 |
| HC | V34C | 0.372 | 1.062 | 0.558 | 0.573 |
| HC | V34I | 1.073 | 2.295 | 1.141 | 1.650 |
| HC | V34M | 0.434 | 1.212 | 0.467 | 0.835 |
| HC | V34P | 0.692 | 3.135 | 0.920 | 1.994 |
| HC | V34L | 1.696 | 3.294 | 1.682 | 2.238 |
| HC | H35I | 2.905 | 96.092 | 3.285 | 16.573 |
| HC | H35Q | 4.926 | 6.014 | 3.510 | 6.052 |
| HC | W36K | 0.617 | 2.808 | 0.790 | 1.992 |
| HC | W36A | 2.841 | 4.005 | 2.076 | 3.920 |
| HC | W36I | 0.588 | 1.638 | 0.729 | 1.452 |
| HC | W36V | 0.864 | 2.274 | 1.114 | 1.961 |
| HC | W36Y | 1.484 | 2.844 | 1.570 | 2.454 |
| HC | V50K | 0.043 | 0.244 | 0.042 | 0.212 |
| HC | V50H | 1.916 | 3.631 | 1.774 | 2.742 |
| HC | V50A | 1.390 | 3.507 | 1.143 | 2.243 |
| HC | V50D | 1.070 | 1.811 | 0.702 | 1.284 |
| HC | V50E | 1.239 | 2.253 | 1.061 | 2.100 |
| HC | V50G | 0.844 | 1.656 | 0.669 | 1.261 |
| HC | V50I | 4.049 | 5.405 | 1.466 | 2.398 |
| HC | V50N | 1.053 | 1.512 | 0.471 | 0.700 |
| HC | V50Q | 2.666 | 4.891 | 1.815 | 2.384 |
| HC | V50T | 0.738 | 3.047 | 0.743 | 2.675 |
| HC | V50L | 0.440 | 0.735 | 0.191 | 0.205 |
| HC | I51K | 2.359 | 4.025 | 1.370 | 1.844 |
| HC | I51H | 3.723 | 14.555 | 1.822 | 2.338 |
| HC | I51A | 1.534 | 2.984 | 0.736 | 0.886 |
| HC | I51C | 1.765 | 2.990 | 0.932 | 1.094 |
| HC | I51E | 3.724 | 5.988 | 2.106 | 3.947 |
| HC | I51G | 5.223 | 8.038 | 1.801 | 3.716 |
| HC | I51N | 2.514 | 3.995 | 1.257 | 1.529 |
| HC | I51Q | 0.877 | 2.625 | 0.777 | 1.184 |
| HC | I51S | 1.255 | 2.857 | 0.936 | 1.196 |
| HC | I51V | 0.562 | 2.392 | 0.568 | 1.375 |
| HC | I51Y | 5.123 | 7.721 | 3.253 | 5.278 |
| HC | I51L | 0.874 | 3.046 | 0.818 | 1.280 |
| HC | W52I | 0.965 | 1.402 | 0.751 | 1.419 |
| HC | W52N | 0.592 | 1.877 | 0.774 | 1.549 |
| HC | W52Y | 0.981 | 3.959 | 1.220 | 2.463 |
| HC | S53H | 0.417 | 1.759 | 0.410 | 1.184 |
| HC | S53R | 1.583 | 2.285 | 1.370 | 1.749 |
| HC | S53A | 0.348 | 1.680 | 0.344 | 1.338 |
| HC | S53C | 0.908 | 2.714 | 0.953 | 2.487 |
| HC | S53G | 0.223 | 1.081 | 0.225 | 0.949 |
| HC | S53I | 0.384 | 1.723 | 0.382 | 1.274 |
| HC | S53M | 1.206 | 3.172 | 1.147 | 1.947 |
| HC | S53P | 0.669 | 2.501 | 0.662 | 1.757 |
| HC | S53Q | 1.381 | 2.721 | 0.940 | 0.979 |
| HC | S53L | 0.900 | 3.262 | 0.910 | 2.425 |
| HC | S53T | 0.419 | 1.674 | 0.450 | 0.671 |
| HC | S53V | 0.545 | 1.894 | 0.552 | 1.373 |
| HC | S53Y | 0.344 | 1.426 | 0.334 | 1.031 |
| HC | G54H | 0.543 | 0.241 | 0.445 | 0.850 |
| HC | G54R | 0.462 | 0.148 | 0.345 | 0.524 |
| HC | G54A | 0.304 | 0.185 | 0.268 | 0.519 |
| HC | G54C | 0.567 | 0.120 | 0.375 | 0.423 |
| HC | G54D | 0.377 | 0.163 | 0.279 | 0.387 |
| HC | G54P | 0.530 | 0.175 | 0.307 | 0.430 |
| HC | G54S | 0.376 | 0.106 | 0.195 | 0.341 |
| HC | G55H | 0.391 | 1.139 | 0.590 | 0.968 |
| HC | G55R | 0.342 | 1.464 | 0.563 | 1.211 |
| HC | G55M | 0.338 | 0.797 | 0.509 | 0.715 |
| HC | G55S | 0.335 | 0.715 | 0.480 | 0.548 |
| HC | G55Y | 0.530 | 0.664 | 0.472 | 0.679 |
| HC | N56K | 0.782 | 1.706 | 0.754 | 1.399 |
| HC | N56A | 1.330 | 2.417 | 0.785 | 0.816 |
| HC | N56P | 4.302 | 21.666 | 2.925 | 3.906 |
| HC | N56S | 1.096 | 2.358 | 0.854 | 1.178 |
| HC | N56V | 0.938 | 1.863 | 0.843 | 1.374 |
| HC | N56G | 1.586 | 2.626 | 0.854 | 1.056 |
| HC | T57H | 1.322 | 2.243 | 0.789 | 1.007 |
| HC | T57R | 0.609 | 1.872 | 0.571 | 1.152 |
| HC | T57L | 0.795 | 2.304 | 0.711 | 1.287 |
| HC | T57A | 0.913 | 3.028 | 0.822 | 1.533 |
| HC | T57C | 0.868 | 2.235 | 0.729 | 1.097 |
| HC | T57D | 2.819 | 3.335 | 1.244 | 1.571 |
| HC | T57F | 0.477 | 1.873 | 0.446 | 1.312 |
| HC | T57M | 1.025 | 2.955 | 0.931 | 0.830 |
| HC | T57N | 1.244 | 2.328 | 0.872 | 1.091 |
| HC | T57Q | 1.019 | 2.576 | 0.859 | 1.226 |
| HC | T57W | 0.744 | 1.996 | 0.636 | 0.832 |
| HC | T57Y | 0.572 | 1.829 | 0.528 | 1.233 |
| HC | D58L | 0.494 | 1.142 | 0.642 | 0.909 |
| HC | D58G | 0.733 | 1.998 | 0.620 | 1.097 |
| HC | D58M | 0.527 | 0.975 | 0.380 | 0.687 |
| HC | D58N | 0.602 | 1.969 | 0.544 | 1.330 |
| HC | D58Q | 0.879 | 1.255 | 0.450 | 0.681 |
| HC | Y59H | 0.664 | 1.120 | 0.711 | 0.837 |
| HC | Y59R | 0.317 | 0.937 | 0.491 | 0.829 |
| HC | Y59A | 0.688 | 0.847 | 0.504 | 0.670 |
| HC | Y59C | 0.581 | 0.976 | 0.673 | 0.791 |
| HC | Y59D | 2.044 | 2.694 | 1.189 | 2.433 |
| HC | Y59E | 0.618 | 1.008 | 0.525 | 0.351 |
| HC | Y59G | 0.337 | 1.012 | 0.511 | 0.905 |
| HC | Y59I | 0.334 | 1.053 | 0.422 | 0.955 |
| HC | Y59P | 3.607 | 5.871 | 1.953 | 7.045 |
| HC | Y59Q | 0.438 | 1.039 | 0.583 | 0.710 |
| HC | Y59S | 0.340 | 0.895 | 0.514 | 0.731 |
| HC | Y59T | 0.395 | 1.082 | 0.567 | 0.770 |
| HC | Y59V | 0.559 | 1.032 | 0.625 | 0.773 |
| HC | Y59W | 0.488 | 1.054 | 0.600 | 0.712 |
| HC | N60K | 0.456 | 1.285 | 0.595 | 1.149 |
| HC | N60A | 0.432 | 1.286 | 0.646 | 1.134 |
| HC | N60C | 1.097 | 1.578 | 1.054 | 1.345 |
| HC | N60D | 2.085 | 42.638 | 2.049 | 8.023 |
| HC | N60F | 0.656 | 1.286 | 0.634 | 0.929 |
| HC | N60G | 0.669 | 1.192 | 0.660 | 0.873 |
| HC | N60P | 1.643 | 2.562 | 1.066 | 2.171 |
| HC | N60Q | 0.967 | 1.396 | 0.871 | 1.282 |
| HC | N60S | 0.722 | 1.169 | 0.631 | 0.853 |
| HC | N60T | 0.607 | 1.193 | 0.715 | 0.973 |
| HC | N60Y | 0.514 | 1.166 | 0.739 | 1.038 |
| HC | T61N | 0.436 | 1.348 | 0.634 | 1.140 |
| HC | T61Q | 0.719 | 1.201 | 0.766 | 0.524 |
| HC | P62G | 0.674 | 1.312 | 0.780 | 1.123 |
| HC | F63H | 0.498 | 0.315 | 0.438 | 0.624 |
| HC | F63R | 0.877 | 0.251 | 0.362 | 0.490 |
| HC | F63L | 0.736 | 0.375 | 0.532 | 0.752 |
| HC | F63A | 0.956 | 0.299 | 0.418 | 0.540 |
| HC | F63C | 1.107 | 0.294 | 0.339 | 0.699 |
| HC | F63D | 0.865 | 0.370 | 0.547 | 0.678 |
| HC | F63G | 0.746 | 0.280 | 0.398 | 0.527 |
| HC | F63M | 0.490 | 0.243 | 0.347 | 0.367 |
| HC | F63N | 2.041 | 0.601 | 1.138 | 0.713 |
| HC | F63Q | 0.732 | 0.297 | 0.419 | 0.482 |
| HC | F63S | 0.352 | 0.123 | 0.188 | 0.101 |
| HC | F63V | 0.514 | 0.269 | 0.364 | 0.415 |
| HC | T64R | 0.182 | 0.570 | 0.297 | 0.474 |
| HC | T64L | 0.298 | 1.068 | 0.467 | 0.919 |
| HC | T64C | 0.516 | 1.008 | 0.703 | 0.933 |
| HC | T64F | 0.693 | 1.832 | 0.598 | 3.168 |
| HC | T64G | 0.172 | 0.535 | 0.284 | 0.451 |
| HC | T64N | 0.493 | 1.405 | 0.331 | 1.574 |
| HC | T64Q | 0.540 | 0.941 | 0.562 | 0.746 |
| HC | T64V | 0.299 | 0.675 | 0.374 | 0.238 |
| HC | S65H | 0.325 | 1.329 | 0.335 | 0.814 |
| HC | S65R | 0.396 | 1.420 | 0.395 | 0.663 |
| HC | S65L | 0.139 | 0.596 | 0.143 | 0.404 |
| HC | S65C | 0.585 | 2.535 | 0.557 | 1.236 |
| HC | S65E | 0.508 | 1.810 | 0.500 | 1.056 |
| HC | S65F | 0.452 | 1.653 | 0.440 | 1.031 |
| HC | S65G | 0.254 | 1.139 | 0.264 | 0.944 |
| HC | S65I | 0.558 | 1.828 | 0.539 | 1.062 |
| HC | S65M | 0.556 | 1.700 | 0.513 | 0.874 |
| HC | S65N | 0.483 | 1.706 | 0.454 | 0.825 |
| HC | S65P | 0.974 | 2.084 | 0.684 | 0.842 |
| HC | S65Q | 0.492 | 1.734 | 0.472 | 0.880 |
| HC | S65T | 0.680 | 1.921 | 0.615 | 1.012 |
| HC | S65W | 0.380 | 1.476 | 0.380 | 0.924 |
| HC | S65Y | 0.329 | 1.393 | 0.329 | 0.990 |
| HC | R66L | 0.671 | 1.783 | 0.588 | 0.671 |
| HC | R66A | 0.998 | 2.099 | 0.814 | 0.996 |
| HC | R66C | 1.915 | 3.034 | 0.953 | 1.308 |
| HC | R66E | 1.811 | 3.037 | 1.102 | 1.597 |
| HC | R66F | 1.562 | 1.318 | 0.751 | 0.814 |
| HC | R66N | 0.935 | 1.661 | 0.709 | 0.995 |
| HC | R66P | 0.974 | 1.756 | 0.631 | 1.267 |
| HC | R66Q | 0.852 | 2.010 | 0.669 | 0.999 |
| HC | R66S | 0.900 | 1.594 | 0.619 | 0.658 |
| HC | R66T | 0.877 | 1.430 | 0.463 | 0.871 |
| HC | R66V | 0.936 | 2.491 | 0.893 | 0.761 |
| HC | R66G | 2.068 | 2.616 | 0.897 | 1.132 |
| HC | L67A | 0.980 | 2.026 | 0.702 | 0.889 |
| HC | L67C | 0.634 | 1.857 | 0.545 | 0.697 |
| HC | L67D | 0.033 | 0.125 | 0.026 | 0.120 |
| HC | L67E | 1.164 | 2.276 | 0.819 | 1.129 |
| HC | L67I | 0.879 | 1.748 | 0.589 | 0.706 |
| HC | L67M | 0.953 | 2.144 | 0.719 | 0.955 |
| HC | L67Q | 1.865 | 2.571 | 0.940 | 1.249 |
| HC | L67S | 0.925 | 2.316 | 0.769 | 0.996 |
| HC | L67T | 1.099 | 2.115 | 0.667 | 0.765 |
| HC | L67V | 1.443 | 2.291 | 0.723 | 0.940 |
| HC | L67Y | 0.852 | 2.598 | 0.792 | 0.633 |
| HC | S68K | 0.351 | 1.123 | 0.329 | 0.607 |
| HC | S68H | 1.426 | 5.677 | 1.487 | 3.076 |
| HC | S68R | 0.352 | 1.259 | 0.340 | 0.643 |
| HC | S68L | 0.862 | 2.245 | 0.715 | 0.945 |
| HC | S68C | 0.340 | 1.251 | 0.340 | 0.675 |
| HC | S68D | 0.661 | 1.879 | 0.600 | 0.439 |
| HC | S68E | 0.443 | 1.435 | 0.418 | 0.710 |
| HC | S68F | 0.713 | 1.782 | 0.396 | 1.344 |
| HC | S68G | 0.704 | 1.879 | 0.573 | 0.969 |
| HC | S68I | 0.608 | 1.796 | 0.558 | 0.775 |
| HC | S68N | 0.456 | 1.188 | 0.414 | 0.580 |
| HC | S68Q | 0.138 | 0.444 | 0.135 | 0.238 |
| HC | S68T | 0.288 | 1.183 | 0.295 | 0.805 |
| HC | S68V | 0.494 | 1.355 | 0.440 | 0.629 |
| HC | I69A | 2.116 | 3.280 | 1.694 | 3.009 |
| HC | I69C | 0.977 | 1.481 | 1.075 | 1.235 |
| HC | I69G | 2.582 | 15.344 | 2.793 | 10.186 |
| HC | I69Y | 1.759 | 2.635 | 1.624 | 3.153 |
| HC | N70H | 1.429 | 3.411 | 0.909 | 1.563 |
| HC | N70R | 3.154 | 3.380 | 1.291 | 1.930 |
| HC | N70L | 1.429 | 3.144 | 1.023 | 1.394 |
| HC | N70D | 3.706 | 5.415 | 1.729 | 2.720 |
| HC | N70E | 1.457 | 3.831 | 1.105 | 1.664 |
| HC | N70F | 0.867 | 2.802 | 0.810 | 1.857 |
| HC | N70G | 1.321 | 3.008 | 1.064 | 1.522 |
| HC | N70I | 1.764 | 3.564 | 1.075 | 1.597 |
| HC | N70P | 1.315 | 15.234 | 2.622 | 8.199 |
| HC | N70Q | 1.347 | 3.162 | 1.011 | 1.838 |
| HC | N70S | 1.059 | 3.405 | 0.978 | 0.825 |
| HC | N70T | 1.246 | 3.260 | 0.987 | 1.481 |
| HC | N70V | 0.071 | 3.033 | 0.851 | 1.850 |
| HC | N70Y | 1.291 | 3.180 | 0.849 | 1.649 |
| HC | K71H | 1.177 | 2.348 | 0.919 | 1.275 |
| HC | K71R | 1.746 | 2.774 | 1.135 | 1.501 |
| HC | K71L | 1.026 | 2.924 | 0.942 | 2.108 |
| HC | K71A | 2.515 | 3.244 | 1.558 | 2.316 |
| HC | K71C | 1.157 | 3.410 | 0.947 | 1.926 |
| HC | K71F | 0.767 | 1.728 | 0.731 | 1.477 |
| HC | K71G | 1.641 | 2.750 | 1.201 | 1.536 |
| HC | K71Q | 1.185 | 2.462 | 1.039 | 2.148 |
| HC | K71S | 1.258 | 2.360 | 1.046 | 1.419 |
| HC | K71T | 1.657 | 2.713 | 1.128 | 0.999 |
| HC | K71V | 1.077 | 2.833 | 0.970 | 1.617 |
| HC | K71W | 0.961 | 2.491 | 0.899 | 1.878 |
| HC | K71Y | 0.777 | 2.371 | 0.690 | 1.677 |
| HC | D72K | 0.483 | 1.078 | 0.382 | 1.374 |
| HC | D72H | 0.610 | 1.573 | 0.529 | 0.685 |
| HC | D72R | 0.299 | 0.897 | 0.287 | 0.424 |
| HC | D72L | 0.353 | 1.304 | 0.166 | 0.308 |
| HC | D72A | 0.760 | 1.625 | 0.783 | 1.435 |
| HC | D72G | 1.060 | 1.912 | 0.631 | 0.854 |
| HC | D72I | 0.528 | 1.484 | 0.453 | 0.691 |
| HC | D72M | 0.444 | 1.080 | 0.393 | 0.444 |
| HC | D72N | 0.699 | 1.986 | 0.639 | 0.992 |
| HC | D72Q | 0.547 | 2.197 | 0.488 | 0.693 |
| HC | D72S | 0.552 | 1.649 | 0.537 | 0.821 |
| HC | D72V | 0.435 | 1.389 | 0.423 | 0.709 |
| HC | D72W | 0.537 | 1.453 | 0.213 | 0.314 |
| HC | D72Y | 0.566 | 1.469 | 0.454 | 0.642 |
| HC | N73H | 1.037 | 1.850 | 0.722 | 0.716 |
| HC | N73R | 0.877 | 1.547 | 0.531 | 0.590 |
| HC | N73L | 0.661 | 1.749 | 0.590 | 0.930 |
| HC | N73A | 1.179 | 1.975 | 0.526 | 0.777 |
| HC | N73C | 1.032 | 2.006 | 0.680 | 0.810 |
| HC | N73G | 0.960 | 1.702 | 0.622 | 0.834 |
| HC | N73I | 0.551 | 1.755 | 0.506 | 0.841 |
| HC | N73M | 0.809 | 1.639 | 0.483 | 0.649 |
| HC | N73P | 1.410 | 2.152 | 0.752 | 1.070 |
| HC | N73Q | 0.898 | 1.693 | 0.609 | 0.329 |
| HC | N73S | 1.138 | 2.107 | 0.762 | 0.943 |
| HC | N73T | 1.090 | 2.026 | 0.782 | 1.090 |
| HC | N73V | 1.339 | 1.945 | 0.743 | 0.963 |
| HC | N73W | 1.193 | 1.868 | 0.673 | 0.901 |
| HC | N73Y | 0.901 | 1.764 | 0.627 | 0.672 |
| HC | S74K | 0.672 | 1.141 | 0.430 | 0.471 |
| HC | S74H | 0.612 | 1.249 | 0.396 | 0.480 |
| HC | S74R | 0.538 | 1.169 | 0.395 | 0.455 |
| HC | S74L | 0.425 | 1.435 | 0.419 | 0.689 |
| HC | S74A | 0.672 | 1.191 | 0.454 | 0.527 |
| HC | S74C | 0.718 | 1.164 | 0.456 | 0.464 |
| HC | S74D | 0.522 | 1.199 | 0.353 | 0.419 |
| HC | S74E | 0.729 | 1.554 | 0.545 | 0.546 |
| HC | S74G | 0.570 | 2.236 | 0.346 | 0.433 |
| HC | S74I | 0.648 | 1.174 | 0.473 | 0.544 |
| HC | S74M | 0.658 | 1.228 | 0.466 | 0.494 |
| HC | S74P | 0.566 | 1.369 | 0.449 | 0.552 |
| HC | S74T | 0.559 | 1.281 | 0.456 | 0.542 |
| HC | S74V | 0.386 | 1.147 | 0.391 | 0.548 |
| HC | S74Y | 0.692 | 1.191 | 0.394 | 0.414 |
| HC | K75H | 0.447 | 1.338 | 0.396 | 0.256 |
| HC | K75R | 0.688 | 1.393 | 0.451 | 0.537 |
| HC | K75L | 0.555 | 1.058 | 0.407 | 0.620 |
| HC | K75A | 0.732 | 1.360 | 0.475 | 0.550 |
| HC | K75C | 0.915 | 1.617 | 0.477 | 0.552 |
| HC | K75E | 0.791 | 1.535 | 0.527 | 0.683 |
| HC | K75F | 0.709 | 1.374 | 0.406 | 0.453 |
| HC | K75M | 0.841 | 1.338 | 0.412 | 0.555 |
| HC | K75Q | 0.611 | 1.463 | 0.448 | 0.508 |
| HC | K75T | 0.836 | 1.280 | 0.452 | 0.561 |
| HC | K75V | 1.060 | 1.712 | 0.530 | 0.599 |
| HC | K75W | 0.932 | 1.398 | 0.390 | 0.498 |
| HC | K75Y | 0.670 | 1.338 | 0.401 | 0.450 |
| HC | S76H | 1.102 | 1.634 | 0.544 | 0.615 |
| HC | S76R | 0.960 | 1.737 | 0.498 | 0.554 |
| HC | S76L | 1.414 | 1.615 | 0.543 | 0.704 |
| HC | S76A | 0.658 | 1.242 | 0.423 | 0.743 |
| HC | S76C | 1.207 | 2.072 | 0.640 | 0.831 |
| HC | S76D | 1.224 | 4.313 | 0.577 | 0.655 |
| HC | S76E | 1.121 | 2.268 | 0.704 | 0.849 |
| HC | S76F | 0.877 | 1.662 | 0.577 | 0.652 |
| HC | S76M | 0.841 | 1.815 | 0.558 | 0.665 |
| HC | S76P | 1.362 | 2.185 | 0.637 | 0.782 |
| HC | S76Q | 1.035 | 1.633 | 0.619 | 0.824 |
| HC | S76T | 1.702 | 2.724 | 0.810 | 0.918 |
| HC | S76Y | 1.264 | 2.087 | 0.639 | 0.788 |
| HC | Q77H | 0.760 | 1.558 | 0.588 | 0.785 |
| HC | Q77R | 0.480 | 1.093 | 0.369 | 0.577 |
| HC | Q77L | 1.600 | 2.089 | 0.673 | 0.839 |
| HC | Q77A | 0.869 | 1.914 | 0.656 | 0.753 |
| HC | Q77E | 0.684 | 1.794 | 0.598 | 0.362 |
| HC | Q77G | 1.626 | 2.074 | 0.646 | 0.826 |
| HC | Q077I | 1.339 | 1.978 | 0.608 | 0.745 |
| HC | Q77M | 0.987 | 1.708 | 0.487 | 0.579 |
| HC | Q77N | 1.063 | 2.097 | 0.646 | 0.845 |
| HC | Q77S | 0.792 | 1.539 | 0.556 | 0.712 |
| HC | Q77V | 0.701 | 1.773 | 0.595 | 0.692 |
| HC | Q77W | 1.272 | 1.805 | 0.600 | 0.828 |
| HC | Q77Y | 0.967 | 1.351 | 0.525 | 0.599 |
| HC | Y93H | 2.932 | 5.071 | 2.461 | 5.308 |
| HC | Y93V | 1.325 | 2.246 | 1.209 | 2.162 |
| HC | Y93W | 1.070 | 2.602 | 0.969 | 3.648 |
| HC | Y94R | 0.194 | 0.808 | 0.302 | 0.665 |
| HC | Y94L | 0.509 | 1.104 | 0.427 | 1.011 |
| HC | R97H | 0.853 | 1.644 | 0.638 | 1.390 |
| HC | R97W | 0.106 | 0.509 | 0.195 | 0.417 |
| HC | A98P | 0.284 | 1.092 | 0.265 | 0.824 |
| HC | L99N | 0.368 | 1.014 | 0.319 | 0.975 |
| HC | L99W | 0.259 | 1.101 | 0.291 | 0.550 |
| HC | T100H | 0.350 | 1.194 | 0.345 | 1.092 |
| HC | T100L | 0.545 | 1.609 | 0.463 | 1.172 |
| HC | T100A | 0.600 | 2.227 | 0.557 | 1.628 |
| HC | T100D | 0.551 | 0.846 | 0.507 | 0.802 |
| HC | T100I | 0.510 | 1.480 | 0.382 | 1.194 |
| HC | T100N | 0.535 | 1.642 | 0.500 | 1.166 |
| HC | T100P | 0.341 | 0.526 | 0.108 | 0.246 |
| HC | T100Q | 0.521 | 1.617 | 0.504 | 1.373 |
| HC | T100S | 0.441 | 1.218 | 0.408 | 0.564 |
| HC | T100V | 0.651 | 1.967 | 0.553 | 1.302 |
| HC | T100Y | 0.724 | 1.533 | 0.607 | 1.150 |
| HC | Y101H | 0.251 | 1.091 | 0.244 | 0.826 |
| HC | Y101E | 0.016 | 0.072 | 0.017 | 0.036 |
| HC | Y101F | 1.117 | 1.976 | 0.681 | 0.890 |
| HC | Y101M | 0.523 | 1.534 | 0.488 | 1.328 |
| HC | Y101W | 0.424 | 1.078 | 0.399 | 0.491 |
| HC | Y102R | 0.025 | 0.116 | 0.020 | 0.103 |
| HC | Y102C | 0.020 | 0.084 | 0.017 | 0.086 |
| HC | Y102D | 0.018 | 0.081 | 0.016 | 0.076 |
| HC | Y102I | 0.017 | 0.072 | 0.013 | 0.065 |
| HC | Y102N | 0.017 | 0.072 | 0.013 | 0.066 |
| HC | Y102W | 0.627 | 1.446 | 0.551 | 0.956 |
| HC | D103R | 0.014 | 0.050 | 0.012 | 0.053 |
| HC | D103L | 0.017 | 0.100 | 0.018 | 0.035 |
| HC | D103A | 0.669 | 0.302 | 0.604 | 1.536 |
| HC | D103C | 0.015 | 0.078 | 0.015 | 0.071 |
| HC | D103I | 0.158 | 0.657 | 0.124 | 0.648 |
| HC | D103P | 0.016 | 0.084 | 0.017 | 0.072 |
| HC | D103Q | 0.544 | 1.768 | 0.522 | 1.441 |
| HC | D103Y | 0.016 | 0.085 | 0.016 | 0.075 |
| HC | Y104H | 0.244 | 0.833 | 0.205 | 0.699 |
| HC | Y104L | 0.496 | 1.289 | 0.439 | 0.931 |
| HC | Y104D | 0.159 | 0.539 | 0.099 | 0.306 |
| HC | Y104F | 0.414 | 1.495 | 0.331 | 0.910 |
| HC | Y104I | 0.283 | 0.616 | 0.237 | 0.555 |
| HC | Y104M | 0.157 | 0.648 | 0.133 | 0.503 |
| HC | Y104S | 0.119 | 0.447 | 0.068 | 0.227 |
| HC | Y104V | 0.091 | 0.376 | 0.080 | 0.269 |
| HC | E105H | 0.149 | 0.720 | 0.226 | 0.555 |
| HC | E105T | 0.185 | 0.550 | 0.194 | 0.498 |
| HC | F106L | 0.266 | 0.740 | 0.253 | 0.636 |
| HC | F106V | 0.492 | 0.889 | 0.455 | 1.165 |
| HC | F106W | 0.537 | 0.997 | 0.575 | 0.879 |
| HC | F106Y | 0.579 | 1.578 | 0.889 | 1.385 |
| HC | A107K | 0.207 | 0.617 | 0.309 | 0.549 |
| HC | A107H | 0.182 | 0.624 | 0.280 | 0.541 |
| HC | A107R | 0.354 | 1.088 | 0.468 | 0.977 |
| HC | A107L | 0.552 | 1.866 | 0.546 | 0.774 |
| HC | A107C | 0.208 | 0.552 | 0.253 | 0.483 |
| HC | A107D | 0.237 | 0.604 | 0.225 | 0.520 |
| HC | A107E | 0.512 | 1.843 | 0.592 | 1.422 |
| HC | A107G | 0.263 | 0.877 | 0.321 | 0.738 |
| HC | A107N | 0.146 | 0.419 | 0.236 | 0.360 |
| HC | A107S | 0.258 | 0.818 | 0.428 | 0.720 |
| HC | A107T | 0.460 | 1.239 | 0.528 | 1.110 |
| HC | A107Y | 0.457 | 1.340 | 0.577 | 1.086 |
| HC | Y108K | 0.716 | 1.023 | 0.531 | 0.886 |
| HC | Y108H | 0.426 | 1.161 | 0.518 | 0.970 |
| HC | Y108R | 1.797 | 3.006 | 1.473 | 2.831 |
| HC | Y108L | 0.578 | 1.209 | 0.600 | 0.871 |
| HC | Y108C | 0.538 | 1.044 | 0.497 | 0.879 |
| HC | Y108F | 0.491 | 1.507 | 0.688 | 1.240 |
| HC | Y108I | 0.023 | 0.053 | 0.025 | 0.042 |
| HC | Y108N | 0.582 | 1.362 | 0.535 | 1.072 |
| HC | Y108S | 0.620 | 1.458 | 0.601 | 1.018 |
| HC | Y108T | 0.487 | 1.104 | 0.458 | 0.755 |
| HC | Y108V | 0.730 | 1.321 | 0.592 | 1.263 |
| HC | Y108W | 0.559 | 1.422 | 0.539 | 1.004 |
| HC | W109I | 1.412 | 2.041 | 1.112 | 1.788 |
| HC | W109M | 0.718 | 1.364 | 0.823 | 1.101 |
| HC | W109Y | 1.076 | 1.749 | 0.989 | 1.472 |
| HC | G110R | 1.165 | 5.194 | 1.833 | 4.433 |
| HC | G110A | 0.720 | 1.560 | 0.838 | 1.427 |
| HC | G110M | 3.249 | 11.020 | 2.455 | 14.823 |
| HC | G110P | 2.292 | 4.834 | 1.970 | 5.395 |
| HC | G110T | 1.168 | 1.938 | 1.149 | 1.733 |
| HC | Q111K | 0.603 | 1.796 | 0.568 | 1.108 |
| HC | Q111H | 2.478 | 3.661 | 1.487 | 1.909 |
| HC | Q111R | 1.220 | 2.302 | 0.870 | 1.091 |
| HC | Q111L | 1.349 | 2.631 | 0.999 | 1.282 |
| HC | Q111D | 1.207 | 2.244 | 0.889 | 1.094 |
| HC | Q111E | 1.067 | 2.588 | 0.869 | 1.163 |
| HC | Q111G | 1.342 | 2.672 | 1.033 | 1.386 |
| HC | Q111M | 2.871 | 3.716 | 1.426 | 0.855 |
| HC | Q111P | 2.397 | 3.826 | 1.384 | 1.795 |
| HC | Q111S | 1.171 | 2.598 | 0.974 | 1.227 |
| HC | Q111T | 0.760 | 2.478 | 0.678 | 1.274 |
| HC | Q111W | 1.646 | 2.561 | 0.994 | 1.186 |
| HC | Q111Y | 1.385 | 2.843 | 1.005 | 1.343 |
| HC | G112A | 2.121 | 2.898 | 1.723 | 2.371 |
| HC | G112N | 1.740 | 12.480 | 1.841 | 5.701 |
| HC | G112P | 1.475 | 2.338 | 1.641 | 2.080 |
| HC | G112S | 1.962 | 2.630 | 1.832 | 2.422 |
| HC | G112T | 2.850 | 6.175 | 2.537 | 7.080 |
| HC | G112Y | 2.473 | 5.622 | 2.147 | 6.430 |
| LC | D1W | 0.388 | 1.173 | 0.590 | 0.657 |
| LC | I2C | 0.739 | 2.597 | 0.981 | 1.004 |
| LC | I2V | 0.616 | 1.321 | 0.793 | 1.102 |
| LC | I2W | 0.715 | 0.885 | 0.844 | 0.427 |
| LC | L3D | 0.755 | 1.080 | 0.632 | 0.979 |
| LC | L3F | 0.811 | 1.170 | 0.629 | 1.131 |
| LC | L3G | 0.362 | 1.254 | 0.608 | 0.408 |
| LC | L3S | 0.668 | 0.872 | 0.578 | 0.833 |
| LC | L3T | 0.914 | 1.597 | 1.219 | 1.265 |
| LC | L3V | 0.968 | 1.999 | 1.315 | 0.949 |
| LC | L3W | 1.668 | 2.322 | 1.500 | 1.892 |
| LC | L3Y | 0.690 | 1.223 | 0.911 | 1.106 |
| LC | L3R | 0.337 | 1.002 | 0.597 | 0.733 |
| LC | L4C | 0.417 | 0.578 | 0.364 | 0.611 |
| LC | L4E | 1.177 | 1.636 | 1.114 | 1.502 |
| LC | L4F | 0.386 | 0.568 | 0.324 | 0.660 |
| LC | L4I | 0.508 | 0.738 | 0.517 | 0.661 |
| LC | L4P | 3.143 | 4.380 | 2.872 | 4.720 |
| LC | L4S | 0.594 | 0.862 | 0.518 | 0.975 |
| LC | L4T | 0.725 | 0.992 | 0.610 | 0.921 |
| LC | L4V | 0.444 | 0.613 | 0.371 | 0.275 |
| LC | L4W | 1.436 | 1.865 | 1.193 | 2.067 |
| LC | L4K | 2.048 | 2.777 | 1.767 | 2.957 |
| LC | L4H | 1.617 | 2.059 | 1.191 | 2.088 |
| LC | L4R | 1.694 | 2.439 | 1.489 | 2.087 |
| LC | T5A | 0.810 | 2.769 | 1.000 | 1.025 |
| LC | T5C | 1.935 | 2.614 | 1.631 | 2.098 |
| LC | T5D | 0.392 | 0.701 | 0.528 | 0.541 |
| LC | T5E | 0.508 | 1.285 | 0.936 | 1.092 |
| LC | T5F | 0.716 | 1.325 | 1.017 | 1.137 |
| LC | T5G | 0.756 | 1.267 | 1.011 | 1.058 |
| LC | T5N | 0.410 | 0.796 | 0.630 | 0.665 |
| LC | T5P | 0.296 | 0.440 | 0.308 | 0.450 |
| LC | T5S | 0.722 | 1.303 | 0.889 | 0.999 |
| LC | T5W | 0.866 | 1.382 | 0.972 | 1.055 |
| LC | T5L | 0.400 | 1.004 | 0.758 | 0.910 |
| LC | T5K | 0.652 | 1.202 | 0.909 | 1.026 |
| LC | T5H | 0.731 | 1.518 | 0.949 | 1.008 |
| LC | T5R | 0.436 | 1.099 | 0.665 | 0.762 |
| LC | R24A | 0.260 | 0.831 | 0.507 | 0.754 |
| LC | R24C | 1.592 | 2.429 | 1.766 | 2.150 |
| LC | R24F | 0.785 | 1.386 | 1.015 | 1.159 |
| LC | R24L | 0.494 | 1.508 | 0.974 | 1.393 |
| LC | R24M | 0.401 | 1.490 | 0.794 | 0.852 |
| LC | R24S | 0.968 | 1.941 | 1.399 | 1.573 |
| LC | R24W | 1.050 | 1.704 | 1.259 | 1.476 |
| LC | R24Y | 0.379 | 0.974 | 0.717 | 0.880 |
| LC | A25C | 1.571 | 2.505 | 2.125 | 2.024 |
| LC | A25G | 1.487 | 3.471 | 2.526 | 3.021 |
| LC | A25L | 2.166 | 2.983 | 2.459 | 2.496 |
| LC | A25V | 1.278 | 5.119 | 1.608 | 2.168 |
| LC | S26A | 0.864 | 1.323 | 0.863 | 1.156 |
| LC | S26C | 2.409 | 2.992 | 1.848 | 2.805 |
| LC | S26D | 1.717 | 10.871 | 1.367 | 2.694 |
| LC | S26I | 1.494 | 2.221 | 1.563 | 2.043 |
| LC | S26M | 1.137 | 1.543 | 0.969 | 1.392 |
| LC | S26N | 1.285 | 2.593 | 1.655 | 1.947 |
| LC | S26V | 1.567 | 2.436 | 1.269 | 2.357 |
| LC | S26W | 1.334 | 1.853 | 1.024 | 1.689 |
| LC | S26L | 1.073 | 1.903 | 1.219 | 1.668 |
| LC | S26G | 1.112 | 2.334 | 1.308 | 1.734 |
| LC | S26H | 0.557 | 1.482 | 0.924 | 1.348 |
| LC | S26R | 0.922 | 1.639 | 0.841 | 2.244 |
| LC | Q27A | 0.440 | 1.468 | 0.643 | 1.199 |
| LC | Q27D | 0.347 | 1.129 | 0.533 | 0.956 |
| LC | Q27E | 0.460 | 1.279 | 0.695 | 0.977 |
| LC | Q27F | 0.724 | 1.673 | 1.017 | 1.339 |
| LC | Q27I | 0.700 | 2.265 | 0.941 | 1.973 |
| LC | Q27M | 0.463 | 1.487 | 0.612 | 1.129 |
| LC | Q27N | 0.496 | 1.556 | 0.737 | 1.404 |
| LC | Q27P | 0.890 | 3.095 | 1.342 | 2.384 |
| LC | Q27T | 0.273 | 1.106 | 0.411 | 0.606 |
| LC | S28A | 0.930 | 1.472 | 0.889 | 1.193 |
| LC | S28D | 0.395 | 1.247 | 0.542 | 1.096 |
| LC | S28N | 0.233 | 1.039 | 0.411 | 0.749 |
| LC | S28Q | 0.350 | 0.696 | 0.466 | 0.547 |
| LC | S28L | 0.901 | 1.246 | 0.822 | 1.048 |
| LC | S28K | 0.753 | 1.147 | 0.855 | 1.056 |
| LC | S28H | 0.622 | 1.213 | 0.799 | 0.900 |
| LC | I29A | 0.426 | 1.249 | 0.570 | 1.137 |
| LC | I29E | 2.165 | 4.067 | 1.903 | 3.483 |
| LC | I29F | 1.438 | 2.842 | 1.628 | 2.610 |
| LC | I29S | 0.742 | 2.224 | 0.741 | 1.306 |
| LC | I29T | 0.575 | 1.496 | 0.733 | 1.260 |
| LC | I29R | 0.172 | 10.634 | 0.669 | 1.587 |
| LC | G30A | 0.643 | 1.440 | 0.851 | 1.236 |
| LC | G30E | 0.606 | 1.900 | 0.898 | 1.678 |
| LC | G30F | 0.938 | 1.806 | 1.064 | 1.232 |
| LC | G30I | 2.886 | 6.582 | 3.948 | 5.708 |
| LC | G30M | 0.594 | 1.535 | 0.819 | 1.364 |
| LC | G30P | 2.033 | 3.978 | 2.296 | 3.399 |
| LC | G30Q | 0.691 | 1.394 | 0.895 | 1.202 |
| LC | G30S | 0.885 | 2.369 | 1.126 | 1.755 |
| LC | G30V | 2.228 | 3.868 | 2.118 | 2.908 |
| LC | G30Y | 0.770 | 1.069 | 0.630 | 0.675 |
| LC | G30L | 1.918 | 4.755 | 2.578 | 1.786 |
| LC | G30K | 0.924 | 1.590 | 0.924 | 1.059 |
| LC | G30H | 0.649 | 1.224 | 0.809 | 1.069 |
| LC | G30R | 0.540 | 1.105 | 0.713 | 0.886 |
| LC | T31A | 0.581 | 1.710 | 0.793 | 1.213 |
| LC | T31F | 1.376 | 5.199 | 1.344 | 1.642 |
| LC | T31G | 0.617 | 1.869 | 0.816 | 1.460 |
| LC | T31M | 0.639 | 2.107 | 0.898 | 1.517 |
| LC | T31S | 0.646 | 1.633 | 0.870 | 1.393 |
| LC | T31V | 0.567 | 1.498 | 0.812 | 1.275 |
| LC | T31W | 0.831 | 1.665 | 0.843 | 1.153 |
| LC | T31L | 0.889 | 1.945 | 1.066 | 1.613 |
| LC | T31K | 0.370 | 1.312 | 0.554 | 1.100 |
| LC | T31H | 0.423 | 1.446 | 0.659 | 1.196 |
| LC | N32G | 0.315 | 1.257 | 0.501 | 1.072 |
| LC | I33F | 2.925 | 4.843 | 3.859 | 4.235 |
| LC | I33G | 2.950 | 21.553 | 2.553 | 4.840 |
| LC | I33M | 1.602 | 3.012 | 2.012 | 2.650 |
| LC | I33T | 1.451 | 2.643 | 1.855 | 2.419 |
| LC | I33V | 1.020 | 2.650 | 1.502 | 2.204 |
| LC | I33H | 2.665 | 4.156 | 2.098 | 3.474 |
| LC | I48M | 0.296 | 0.926 | 0.450 | 0.755 |
| LC | I48S | 0.380 | 1.161 | 0.617 | 0.925 |
| LC | I48L | 0.401 | 1.104 | 0.537 | 0.843 |
| LC | I48K | 0.406 | 1.063 | 0.564 | 0.843 |
| LC | K49A | 0.482 | 1.910 | 0.502 | 1.306 |
| LC | K49E | 1.256 | 3.021 | 1.146 | 2.287 |
| LC | K49F | 1.447 | 4.245 | 1.325 | 2.299 |
| LC | K49G | 0.658 | 2.569 | 0.679 | 1.657 |
| LC | K49N | 0.578 | 2.026 | 0.570 | 1.043 |
| LC | K49Q | 0.536 | 2.041 | 0.524 | 1.540 |
| LC | K49S | 0.362 | 1.597 | 0.376 | 1.112 |
| LC | K49T | 0.592 | 2.367 | 0.594 | 1.297 |
| LC | K49V | 1.002 | 2.973 | 0.903 | 1.586 |
| LC | K49Y | 1.231 | 3.109 | 0.970 | 1.505 |
| LC | K49L | 0.903 | 3.860 | 0.881 | 2.054 |
| LC | K49H | 0.912 | 2.578 | 0.843 | 1.128 |
| LC | K49R | 0.342 | 1.611 | 0.345 | 1.300 |
| LC | A51T | 0.980 | 2.366 | 1.388 | 1.877 |
| LC | A51L | 0.763 | 2.758 | 1.330 | 2.485 |
| LC | S52A | 0.398 | 1.531 | 0.770 | 0.850 |
| LC | S52C | 1.091 | 1.720 | 1.195 | 1.383 |
| LC | S52D | 0.499 | 1.721 | 0.920 | 1.535 |
| LC | S52E | 0.535 | 1.648 | 1.011 | 1.400 |
| LC | S52G | 0.519 | 0.996 | 0.672 | 0.840 |
| LC | S52I | 0.893 | 1.799 | 1.225 | 1.511 |
| LC | S52M | 1.055 | 1.884 | 1.390 | 1.453 |
| LC | S52Q | 0.770 | 1.500 | 1.142 | 1.279 |
| LC | S52V | 0.559 | 1.542 | 0.982 | 1.388 |
| LC | S52W | 0.877 | 1.678 | 1.176 | 1.399 |
| LC | S52R | 0.447 | 1.379 | 0.713 | 1.159 |
| LC | S52K | 0.689 | 1.700 | 0.974 | 1.264 |
| LC | E53G | 0.124 | 0.591 | 0.143 | 0.447 |
| LC | S54M | 0.196 | 1.032 | 0.394 | 0.943 |
| LC | I55A | 0.256 | 0.952 | 0.446 | 0.603 |
| LC | I55F | 0.445 | 1.383 | 0.762 | 1.190 |
| LC | S56G | 0.760 | 3.081 | 0.742 | 1.858 |
| LC | S56L | 0.934 | 3.319 | 0.889 | 1.682 |
| LC | S56A | 0.545 | 2.069 | 0.555 | 1.215 |
| LC | S56C | 1.565 | 3.809 | 1.294 | 0.889 |
| LC | S56D | 0.622 | 2.026 | 0.596 | 1.222 |
| LC | S56E | 0.523 | 2.033 | 0.513 | 1.279 |
| LC | S56F | 0.591 | 1.918 | 0.584 | 1.086 |
| LC | S56N | 0.555 | 1.949 | 0.573 | 1.119 |
| LC | S56P | 0.397 | 1.746 | 0.410 | 1.441 |
| LC | S56Q | 0.511 | 1.827 | 0.504 | 1.015 |
| LC | S56V | 0.563 | 2.070 | 0.564 | 1.279 |
| LC | S56W | 0.731 | 2.335 | 0.674 | 1.212 |
| LC | S56H | 0.414 | 1.379 | 0.325 | 1.528 |
| LC | S56R | 0.786 | 2.454 | 0.716 | 1.271 |
| LC | S56K | 0.476 | 1.808 | 0.470 | 1.146 |
| LC | Y86F | 2.224 | 3.759 | 1.675 | 3.937 |
| LC | Y86M | 2.183 | 3.912 | 1.679 | 4.267 |
| LC | Y86H | 1.595 | 2.459 | 1.224 | 1.087 |
| LC | Y87L | 1.922 | 2.752 | 0.963 | 1.374 |
| LC | Y87C | 1.722 | 2.953 | 1.047 | 1.408 |
| LC | Y87D | 3.099 | 4.313 | 1.364 | 2.624 |
| LC | Y87F | 0.376 | 1.332 | 0.398 | 0.817 |
| LC | Y87G | 3.312 | 4.426 | 1.249 | 2.134 |
| LC | Y87I | 0.609 | 1.941 | 0.593 | 1.044 |
| LC | Y87N | 2.778 | 9.344 | 1.195 | 1.738 |
| LC | Y87P | 2.621 | 3.657 | 1.389 | 2.794 |
| LC | Y87S | 1.480 | 2.785 | 0.972 | 1.264 |
| LC | Y87T | 1.323 | 2.744 | 1.064 | 1.629 |
| LC | Y87V | 0.736 | 2.206 | 0.684 | 1.058 |
| LC | Y87W | 0.793 | 2.161 | 0.782 | 1.338 |
| LC | Y87K | 2.610 | 3.360 | 1.262 | 1.867 |
| LC | Y87H | 0.236 | 0.470 | 0.160 | 0.429 |
| LC | Y87R | 1.388 | 2.280 | 0.834 | 1.237 |
| LC | Q89E | 0.961 | 1.749 | 1.031 | 1.387 |
| LC | N91L | 1.701 | 3.145 | 0.851 | 2.286 |
| LC | N91A | 0.275 | 1.079 | 0.251 | 0.948 |
| LC | N91C | 0.640 | 1.490 | 0.543 | 0.990 |
| LC | N91I | 0.678 | 2.153 | 0.632 | 0.685 |
| LC | N91M | 0.655 | 1.996 | 0.607 | 1.575 |
| LC | N91S | 0.363 | 1.688 | 0.345 | 1.494 |
| LC | N91T | 0.450 | 1.583 | 0.418 | 1.138 |
| LC | N91V | 0.401 | 1.446 | 0.377 | 1.272 |
| LC | N91H | 0.568 | 1.649 | 0.541 | 0.880 |
| LC | N91R | 0.029 | 0.121 | 0.026 | 0.118 |
| LC | N92C | 1.107 | 2.897 | 1.022 | 2.216 |
| LC | N92D | 0.819 | 2.986 | 0.792 | 2.241 |
| LC | N92L | 0.688 | 1.848 | 0.730 | 0.962 |
| LC | N92M | 0.576 | 1.892 | 0.593 | 0.912 |
| LC | N92S | 0.639 | 2.367 | 0.566 | 1.408 |
| LC | N92T | 0.735 | 2.923 | 0.759 | 1.960 |
| LC | N92V | 0.924 | 4.052 | 0.933 | 2.824 |
| LC | N92W | 0.563 | 2.322 | 0.532 | 2.091 |
| LC | N92Y | 1.771 | 2.649 | 1.465 | 2.052 |
| LC | N92H | 0.620 | 2.443 | 0.579 | 2.005 |
| LC | N92K | 0.635 | 0.817 | 0.687 | 0.700 |
| LC | N92R | 0.711 | 1.893 | 0.705 | 0.821 |
| LC | N93T | 0.035 | 0.085 | 0.050 | 0.062 |
| LC | T96L | 0.577 | 1.631 | 0.727 | 0.917 |
| LC | T96C | 1.341 | 3.139 | 1.570 | 2.292 |
| LC | T96M | 0.726 | 2.470 | 0.963 | 1.503 |
| LC | T96V | 0.476 | 1.360 | 0.663 | 1.032 |
| LC | T97L | 0.758 | 1.256 | 0.934 | 1.050 |
| LC | T97A | 0.430 | 0.978 | 0.852 | 0.427 |
| LC | T97D | 1.045 | 1.378 | 1.007 | 1.186 |
| LC | T97G | 0.722 | 1.113 | 1.018 | 0.988 |
| LC | T97Q | 0.616 | 1.181 | 1.025 | 1.058 |
| LC | T97S | 0.636 | 0.821 | 0.952 | 0.657 |
| LC | T97V | 0.629 | 1.355 | 0.919 | 1.176 |
| LC | T97K | 0.388 | 0.782 | 0.747 | 0.721 |
| LC | T97R | 0.859 | 1.424 | 0.748 | 1.681 |
| LC | F98A | 1.103 | 1.634 | 1.008 | 0.762 |
| LC | F98M | 1.483 | 2.284 | 1.354 | 2.064 |
| LC | F98S | 1.355 | 2.066 | 1.373 | 1.903 |
| LC | F98V | 2.045 | 2.874 | 1.802 | 2.446 |
| LC | F98Y | 0.548 | 1.302 | 0.669 | 1.077 |
| LC | G99L | 1.340 | 1.901 | 0.964 | 1.484 |
| LC | G99D | 1.750 | 2.208 | 1.387 | 1.970 |
| LC | G99E | 2.145 | 3.593 | 1.738 | 3.642 |
| LC | G99F | 4.569 | 7.151 | 2.674 | 4.939 |
| LC | G99I | 3.247 | 4.768 | 2.653 | 4.512 |
| LC | G99M | 3.359 | 5.103 | 2.188 | 4.173 |
| LC | G99N | 2.872 | 3.607 | 2.348 | 3.907 |
| LC | G99S | 0.960 | 1.660 | 1.158 | 0.999 |
| LC | G99T | 1.757 | 2.243 | 1.591 | 1.690 |
| LC | G99V | 2.850 | 3.773 | 2.351 | 2.864 |
| LC | G99K | 8.663 | 14.378 | 6.534 | 6.695 |
| LC | G99H | 1.416 | 1.792 | 1.323 | 1.311 |
| LC | Q100C | 1.256 | 2.897 | 1.023 | 1.414 |
| LC | Q100D | 0.772 | 2.716 | 0.802 | 1.875 |
| LC | Q100E | 0.797 | 2.698 | 0.808 | 1.570 |
| LC | Q100F | 0.716 | 2.360 | 0.696 | 1.404 |
| LC | Q100I | 1.154 | 3.244 | 1.113 | 1.986 |
| LC | Q100M | 0.867 | 2.533 | 0.800 | 1.460 |
| LC | Q100N | 0.472 | 2.107 | 0.491 | 1.691 |
| LC | Q100P | 0.736 | 2.823 | 0.778 | 1.850 |
| LC | Q100T | 0.870 | 3.235 | 0.864 | 0.896 |
| LC | Q100V | 0.672 | 2.331 | 0.659 | 1.447 |
| LC | Q100W | 0.791 | 2.343 | 0.783 | 1.211 |
| LC | Q100Y | 0.736 | 2.780 | 0.760 | 2.001 |
| LC | Q100K | 0.726 | 2.396 | 0.694 | 1.351 |
| LC | Q100H | 0.630 | 2.086 | 0.618 | 1.323 |
| LC | Q100R | 0.761 | 2.471 | 0.759 | 1.380 |

^{a}HC = Heavy Chain, LC = Light Chain

[1027] 3. Confirmation Screen

[1028] A confirmation screen was performed as described in part 2, except that 5% serum was used at both pH values. Table 34 sets forth the OD at pH 6.0 (OD_{6.0}) at each dilution, OD at pH 7.4 (OD_{7.4}) at each dilution, and the ratio of the average OD values at pH 6.0 and 7.4 (OD_{6.0}/OD_{7.4}) for the exemplary tested modified antibodies at Dilution 1 and Dilution 2.

TABLE 34
Variant anti-EGFR antibodies

| | | OD_{pH 6.0} | | | | OD_{pH 7.4} | | | | OD_{pH 6.0}/OD_{pH 7.4} | |
|---|---|---|---|---|---|---|---|---|---|---|---|
| Chain^{a} | Mutation | Dilution 1 | | Dilution 2 | | Dilution 1 | | Dilution 2 | | Dilution 1 | Dilution 2 |
| HC | L029Y | 0.181 | 0.179 | 0.092 | 0.093 | 0.132 | 0.130 | 0.075 | 0.079 | 1.370 | 1.206 |
| HC | L029S | 1.116 | 1.143 | 0.303 | 0.327 | 0.545 | 0.583 | 0.074 | 0.074 | 2.004 | 4.251 |
| HC | L029K | 1.940 | 1.906 | 0.529 | 0.724 | 1.122 | 1.134 | 0.324 | 0.000 | 1.705 | 1.970 |
| HC | L029H | 0.814 | 0.790 | 0.216 | 0.203 | 0.396 | 0.355 | 0.132 | 0.124 | 2.142 | 1.635 |
| HC | L029N | 0.248 | 0.259 | 0.111 | 0.099 | 0.156 | 0.157 | 0.083 | 0.092 | 1.623 | 1.215 |
| HC | L029D | 0.543 | 0.496 | 0.156 | 0.149 | 0.285 | 0.290 | 0.104 | 0.115 | 1.808 | 1.401 |
| HC | L029V | 0.807 | 0.851 | 0.204 | 0.237 | 0.397 | 0.409 | 0.135 | 0.130 | 2.058 | 1.669 |
| HC | L029F | 0.420 | 0.445 | 0.131 | 0.137 | 0.251 | 0.244 | 0.105 | 0.108 | 1.748 | 1.255 |
| HC | L029I | 1.753 | 1.713 | 0.514 | 0.522 | 0.948 | 0.918 | 0.273 | 0.278 | 1.858 | 1.880 |
| HC | L029A | 1.822 | 1.861 | 0.582 | 0.662 | 0.938 | 0.888 | 0.275 | 0.289 | 2.019 | 2.202 |
| HC | L029M | 1.472 | 1.358 | 0.435 | 0.465 | 0.751 | 0.729 | 0.206 | 0.215 | 1.912 | 2.135 |
| HC | L029G | 0.291 | 0.289 | 0.111 | 0.111 | 0.171 | 0.165 | 0.089 | 0.093 | 1.723 | 1.226 |
| HC | T030V | 2.448 | 2.492 | 1.150 | 1.727 | 2.045 | 2.162 | 0.673 | 0.812 | 1.175 | 1.917 |
| HC | T030G | 2.528 | 2.483 | 1.323 | 1.329 | 1.748 | 1.659 | 0.557 | 0.000 | 1.471 | 2.399 |
| HC | T030S | 2.411 | 2.423 | 1.046 | 1.209 | 1.520 | 1.545 | 0.467 | 0.418 | 1.578 | 2.567 |
| HC | T030M | 2.189 | 2.256 | 0.713 | 0.900 | 1.289 | 1.230 | 0.338 | 0.322 | 1.766 | 2.453 |
| HC | T030R | 2.326 | 2.269 | 0.683 | 0.995 | 1.260 | 1.376 | 0.340 | 0.370 | 1.748 | 2.349 |
| HC | T030P | 2.217 | 2.216 | 0.688 | 0.911 | 1.261 | 1.159 | 0.318 | 0.375 | 1.836 | 2.298 |
| HC | T030H | 2.062 | 2.003 | 0.658 | 0.749 | 1.225 | 1.163 | 0.276 | 0.354 | 1.703 | 2.249 |
| HC | T030W | 2.042 | 2.058 | 0.683 | 0.702 | 1.208 | 1.139 | 0.316 | 0.322 | 1.748 | 2.170 |
| HC | T030D | 2.378 | 2.404 | 1.055 | 1.352 | 1.462 | 1.549 | 0.461 | 0.478 | 1.589 | 2.559 |
| HC | T030N | 2.276 | 2.237 | 0.907 | 1.027 | 1.396 | 1.326 | 0.373 | 0.410 | 1.659 | 2.470 |
| HC | Y032L | 1.263 | 1.249 | 0.307 | 0.349 | 0.570 | 0.567 | 0.182 | 0.161 | 2.209 | 1.932 |
| HC | Y032R | 1.871 | 1.881 | 0.513 | 0.554 | 0.994 | 0.980 | 0.279 | 0.259 | 1.901 | 1.987 |
| HC | Y032N | 2.023 | 2.042 | 0.611 | 2.097 | 0.992 | 1.090 | 0.365 | 0.359 | 1.957 | 1.832 |
| HC | Y032H | 2.097 | 2.099 | 0.804 | 0.841 | 1.199 | 1.229 | 0.397 | 0.396 | 1.729 | 2.074 |
| HC | Y032C | 0.426 | 0.451 | 0.137 | 0.168 | 0.378 | 0.401 | 0.140 | 0.137 | 1.125 | 1.104 |
| HC | Y032T | 1.927 | 1.880 | 0.732 | 0.963 | 1.333 | 1.316 | 0.582 | 0.643 | 1.437 | 1.378 |
| HC | Y032M | 2.356 | 2.411 | 0.557 | 0.825 | 1.622 | 1.604 | 0.462 | 0.504 | 1.478 | 1.423 |
| HC | V034L | 0.554 | 0.537 | 0.157 | 0.171 | 0.270 | 0.251 | 0.103 | 0.103 | 2.095 | 1.592 |
| HC | V034I | 1.200 | 1.061 | 0.317 | 1.455 | 0.533 | 0.503 | 0.147 | 0.163 | 2.183 | 2.076 |
| HC | V034M | 1.455 | 1.549 | 0.433 | 0.466 | 0.723 | 0.762 | 0.222 | 0.230 | 2.023 | 1.986 |
| HC | V034C | 1.317 | 1.265 | 0.359 | 0.357 | 0.667 | 0.652 | 0.197 | 0.192 | 1.956 | 1.845 |
| HC | H035N | 0.888 | 0.839 | 0.319 | 0.436 | 0.718 | 0.748 | 0.241 | 0.254 | 1.179 | 1.518 |
| HC | W036L | 1.601 | 1.562 | 0.456 | 0.495 | 0.629 | 0.599 | 0.201 | 0.207 | 2.578 | 2.332 |
| HC | W036Y | 0.608 | 0.574 | 0.171 | 0.176 | 0.242 | 0.224 | 0.101 | 0.108 | 2.533 | 1.662 |
| HC | I069T | 0.496 | 0.486 | 0.154 | 0.150 | 0.216 | 0.217 | 0.096 | 0.099 | 2.272 | 1.557 |
| HC | I069M | 0.498 | 0.509 | 0.148 | 0.181 | 0.216 | 0.239 | 0.096 | 0.100 | 2.218 | 1.673 |
| HC | I069C | 0.512 | 0.505 | 0.159 | 0.164 | 0.253 | 0.243 | 0.106 | 0.112 | 2.049 | 1.482 |
| HC | Y093H | 0.551 | 0.523 | 0.187 | 0.170 | 0.328 | 0.358 | 0.115 | 0.123 | 1.571 | 1.504 |
| HC | Y094L | 1.173 | 1.151 | 0.334 | 0.279 | 0.497 | 0.532 | 0.109 | 0.187 | 2.262 | 2.276 |
| HC | Y094R | 2.325 | 2.409 | 0.662 | 1.199 | 1.494 | 1.455 | 0.446 | 0.454 | 1.606 | 2.063 |
| HC | R097H | 1.077 | 1.150 | 0.211 | 0.360 | 0.406 | 0.425 | 0.139 | 0.143 | 2.679 | 2.019 |
| HC | L099N | 2.052 | 2.205 | 0.704 | 0.695 | 1.227 | 1.220 | 0.265 | 0.524 | 1.739 | 2.209 |
| HC | Y104S | 0.695 | 0.801 | 0.211 | 0.280 | 0.117 | 0.111 | 0.075 | 0.084 | 6.562 | 3.059 |
| HC | Y104V | 2.078 | 2.153 | 0.687 | 0.947 | 1.288 | 1.358 | 0.421 | 0.512 | 1.599 | 1.741 |
| HC | Y104D | 1.486 | 1.505 | 0.580 | 0.724 | 0.439 | 0.413 | 0.111 | 0.196 | 3.515 | 4.457 |
| HC | Y104M | 1.847 | 1.883 | 0.670 | 1.043 | 0.899 | 0.852 | 0.316 | 0.428 | 2.132 | 2.279 |
| HC | Y104F | 1.527 | 1.463 | 0.410 | 0.527 | 0.638 | 0.574 | 0.183 | 0.241 | 2.471 | 2.217 |
| HC | Y104L | 1.343 | 1.585 | 0.418 | 0.557 | 0.681 | 0.646 | 0.204 | 0.247 | 2.213 | 2.152 |
| HC | A107E | 1.556 | 1.487 | 0.505 | 0.500 | 0.665 | 0.648 | 0.203 | 0.232 | 2.318 | 2.324 |
| HC | Y108I | 1.148 | 1.257 | 0.282 | 0.411 | 0.533 | 0.492 | 0.173 | 0.179 | 2.353 | 1.964 |
| HC | Y108L | 0.880 | 0.950 | 0.287 | 0.244 | 0.481 | 0.473 | 0.133 | 0.195 | 1.918 | 1.704 |
| HC | Y108W | 1.331 | 1.377 | 0.414 | 0.426 | 0.673 | 0.667 | 0.188 | 0.286 | 2.022 | 1.844 |
| HC | Y108T | 1.494 | 1.566 | 0.292 | 0.528 | 0.608 | 0.709 | 0.192 | 0.220 | 2.333 | 1.961 |
| HC | Y108S | 1.293 | 1.358 | 0.311 | 0.404 | 0.595 | 0.565 | 0.169 | 0.174 | 2.288 | 2.079 |
| HC | Y108N | 1.409 | 1.374 | 0.360 | 0.435 | 0.623 | 0.640 | 0.182 | 0.193 | 2.205 | 2.114 |
| HC | Y108K | 0.183 | 0.541 | 0.149 | 0.164 | 0.266 | 0.261 | 0.109 | 0.105 | 1.380 | 1.471 |
| HC | W109M | 0.583 | 0.678 | 0.175 | 0.205 | 0.303 | 0.314 | 0.108 | 0.128 | 2.042 | 1.616 |
| HC | W109I | 0.440 | 0.466 | 0.143 | 0.151 | 0.241 | 0.234 | 0.099 | 0.108 | 1.907 | 1.420 |
| HC | G110A | 1.906 | 2.205 | 0.608 | 0.910 | 1.130 | 1.104 | 0.360 | 0.334 | 1.843 | 2.205 |
| HC | G110D | 1.639 | 1.450 | 0.431 | 0.445 | 0.731 | 0.713 | 0.218 | 0.191 | 2.138 | 2.156 |
| HC | G110T | 0.770 | 0.783 | 0.203 | 0.176 | 0.381 | 0.399 | 0.145 | 0.112 | 1.992 | 1.482 |
| HC | G112A | 1.162 | 1.194 | 0.303 | 0.392 | 0.623 | 0.644 | 0.180 | 0.147 | 1.860 | 2.173 |
| LC | I033M | 2.183 | 2.207 | 0.721 | 0.639 | 1.336 | 1.183 | 0.372 | 0.348 | 1.750 | 1.889 |
| LC | I033L | 2.051 | 2.115 | 0.639 | 0.797 | 1.071 | 1.047 | 0.287 | 0.315 | 1.968 | 2.379 |
| LC | I033T | 0.928 | 0.912 | 0.244 | 0.237 | 0.389 | 0.388 | 0.134 | 0.128 | 2.367 | 1.838 |
| LC | I033F | 0.780 | 0.765 | 0.193 | 0.215 | 0.346 | 0.346 | 0.124 | 0.124 | 2.235 | 1.646 |
| LC | I033A | 0.922 | 1.005 | 0.274 | 0.265 | 0.462 | 0.486 | 0.149 | 0.153 | 2.031 | 1.785 |
| LC | I033C | 1.370 | 1.356 | 0.399 | 0.417 | 0.642 | 0.708 | 0.196 | 0.233 | 2.025 | 1.912 |
| LC | I033V | 2.386 | 2.389 | 1.302 | 1.776 | 1.895 | 1.804 | 0.703 | 0.766 | 1.292 | 2.085 |
| LC | Y086H | 0.503 | 0.561 | 0.140 | 0.165 | 0.232 | 0.275 | 0.103 | 0.103 | 2.107 | 1.481 |
| LC | Y086F | 0.496 | 0.517 | 0.157 | 0.158 | 0.241 | 0.253 | 0.099 | 0.097 | 2.051 | 1.602 |
| LC | F098S | 0.704 | 0.726 | 0.165 | 0.225 | 0.288 | 0.303 | 0.111 | 0.148 | 2.422 | 1.503 |
| LC | F098Y | 2.236 | 2.283 | 0.899 | 1.225 | 1.360 | 1.352 | 0.399 | 0.000 | 1.667 | 2.291 |
| LC | F098M | 0.408 | 0.452 | 0.136 | 0.144 | 0.190 | 0.185 | 0.096 | 0.096 | 2.296 | 1.457 |
| LC | G099D | 0.734 | 0.717 | 0.200 | 0.214 | 0.330 | 0.285 | 0.111 | 0.123 | 2.373 | 1.774 |
| LC | G099S | 1.948 | 1.945 | 0.684 | 0.732 | 1.140 | 1.225 | 0.314 | 0.321 | 1.648 | 2.230 |
| LC | G099L | 0.546 | 0.501 | 0.160 | 0.188 | 0.262 | 0.256 | 0.110 | 0.101 | 2.020 | 1.660 |
| LC | G099T | 0.845 | 0.809 | 0.233 | 0.227 | 0.432 | 0.415 | 0.137 | 0.127 | 1.951 | 1.742 |
| LC | G099H | 0.448 | 0.445 | 0.139 | 0.152 | 0.253 | 0.251 | 0.098 | 0.092 | 1.771 | 1.528 |

^{a}HC = Heavy Chain, LC = Light Chain

### Example 6

### Generation and Screening of a Combinatorial Library

[1029] A combinatorial library of anti-EGFR variant members is generated that contains antibody members having all combinations of mutations LC-I29S, HC-V24E, HC-S25C, HC-F27R, HC-R97H and/or HC-Q111P, together with HC-Y104E. The multiple point mutants are generated in the heavy chain variable region of the HC-Y104E Cetuximab mutant anti-EGFR antibody described in Example 1 (containing a variable heavy chain set forth in SEQ ID NO: 74 or a variable light chain set forth in SEQ ID NO: 8) or in the heavy chain variable region of the humanized form of HC-Y104E generated in Example 4 by site-directed mutagenesis (containing a variable heavy chain set forth in SEQ ID NO: 61 and a variable light chain set forth in SEQ ID NO: 183). Each member of the library is sequenced and stored as glycerol stocks at −80° C. Among the combination mutants generated are mutants as set forth in Table 35.

TABLE 35
Exemplary Y104E combination modified anti-EGFR antibodies

SEQ ID NO

| Mutation(s) | HC | LC |
|---|---|---|
| HC-S25C/HC-Y104E | 79 | 8 |
| HC-S25V/HC-Y104E | 88 | 8 |
| HC-S25V/HC-Y104E/HC-Q111P | 91 | 8 |
| HC-S25V/HC-S53G/HC-Y104E | 94 | 8 |
| HC-S25V/HC-S53G/HC-Y104E/HC-Q111P | 97 | 8 |
| HC- F027G/Y104E | 315 | 8 |
| HC- F027G/Y104E/Q111P | 318 | 8 |
| HC- F027G/S053G/Y104E | 321 | 8 |
| HC- F027G/S053G/Y104E/Q111P | 324 | 8 |
| HC-T30F/HC-Y104E | 100 | 8 |
| HC-T30F/HC-Y104E/HC-Q111P | 103 | 8 |
| HC-T30F/HC-S53G/HC-Y104E | 106 | 8 |
| HC-T30F/HC-S53G/HC-Y104E/HC-Q111P | 109 | 8 |
| HC-S53G/HC-D72L/HC-Y104E | 118 | 8 |
| HC-S53G/HC-D72L/HC-Y104E/HC-Q111P | 121 | 8 |
| HC-S53G/HC-Y104E | 82 | 8 |
| HC-S53G/HC-Y104E/HC-Q111P | 85 | 8 |
| HC-D72L/HC-Y104E | 112 | 8 |
| HC-D72L/HC-Y104E/HC-Q111P | 115 | 8 |
| HC-Y104E/HC-Q111P | 76 | 8 |
| HC-Y104E/LC-I29S | 72 | 214 |
| HC-Y104E/HC-Q111P/LC-I29S | 76 | 214 |

[1030] For screening, an expression vector encoding a member of the library is separately expressed in CHO cells as IgG antibodies and supernatants collected. The library is screened by pH sensitive ELISA, as described in Example 3. Exemplary antibodies exhibiting higher binding activity at pH 6.0 compared to pH 7.4 are selected.

### Example 7

### Binding Affinity of Identified Hits

[1031] Bio-layer interferometry is performed to measure binding of variant anti-EGFR antibodies to EGFR at pH 6.5 and pH 7.4. The dissociation constant (K_{D}) of Cetuximab and Y104E-containing variant anti-EGFR antibodies for sEGFR are measured by bio-layer interferometry in a 96-well format using an Octet QKe instrument (ForteBio, Menlo Park, Calif.). Data Acquisition software is used for all the operation steps including biotinylated sECD EGFR ligand loading and antibody association and dissociation steps. The ligand loading and antibody association and dissociation steps are performed with two groups, one at pH 6.5 and the other at pH 7.4.

[1032] Biotinylated sECD EGFR is prepared by adding 15 μL of NHS-PEG4-Biotin solution (20 mM in ultrapure water) (PIERCE, Cat#21329) to 1 mg of sEGFR in solution, and incubating the reaction mixture at room temperature for 30 minutes. Nonreacted NHS-PEG4-Biotin is removed by dialysis, and the protein concentration of biotinylated sEGFR is measured by BCA protein assay (PIERCE, Cat#23225) according to manufacturer's instruction.

[1033] 1. Binding Affinity of Anti-EGFR Variants at pH 6.5 and pH 7.4

[1034] To assess the difference in binding at different pH, biotinylated sECD EGFR is bound to a streptavidin biolayer in PBS at pH 6.5 or at pH 7.4 (ligand loading step). The streptavidin sensors are then dipped in wells containing PBS (pH 6.5 or pH 7.4) for 1 minute. Then, the sensors are dipped in wells containing biotinylated sEGFR (50 μg/mL) in PBS (pH 6.5 or pH 7.4) for 2 minutes. Sensors are rinsed in wells containing PBS (pH 6.5 or pH 7.4). During all steps, the plate is agitated at 1000 rpm.

[1035] To measure association rates, the immobilized sECD-EGFR sensors are dipped into wells with antibody (Cetuximab or Y104E variant anti-EGFR antibodies) at 22 nM or 66.7 nM in PBS at pH 6.5 or 7.4 for 2 min. To measure dissociation rates, antibody bound sensors are dipped in PBS wells at pH 6.5 or 7.4 for 4 min. Association and dissociation of sEGFR and antibody (Cetuximab or Y104E variant anti-EGFR antibodies) are quantitated by measuring changes in the interference pattern generated from light reflected from the optical layer and the biolayer. Association rates, dissociation rates and K_{D} values are calculated with Software Data Analysis (v. 6.4) using global curve fitting.

### Example 8

### EGFR Phosphorylation

[1036] The concentration of phosphorylated EGFR from human neonatal keratinocytes and A431 cells treated with the reference Cetuximab antibody or Y104E anti-EGFR antibody variants is measured by ELISA (RnD systems reagents, #DYC3570-2).

[1037] 1. Preparation of Samples

[1038] Approximately 10,000 cells, human neonatal keratinocytes (Invitrogen C-001-5C) or A431 cells (ATCC CRL 1555); are plated in wells of a 96 well plate (BD Falcon #35-3072). After overnight incubation at 37° C. in a humidified atmosphere of 5% CO₂ incubator, the cells are washed, resuspended in serum free Dulbecco's Modified Eagle Medium (DMEM) and incubated overnight under the same conditions. The cells are washed with cold Phosphate Buffered Saline (PBS; 137 mM NaCl, 2.7 mM KCl, 8.1 mM Na₂HPO₄, 1.5 mM KH₂PO₄, pH 7.2-7.4). Then, the plates are divided into two groups. In the first group, 10 μg/mL purified Cetuximab or anti-EGFR antibody containing HC-Y104E variant or buffer control is added in phosphate buffer adjusted to pH 7.4. In the second group, purified Cetuximab or anti-EGFR antibody containing HC-Y104E variant or buffer control is added in phosphate buffer adjusted to pH 6.5.

[1039] For A431 cells, a dose-response also is performed, whereby Cetuximab or anti-EGFR antibody containing HC-Y104E variant are added to samples at a concentration of 30 μg/mL, 10 μg/mL, 3.33 μg/mL, 1.11 μg/mL, 0.37 μg/mL, 0.123 μg/mL and 0.001 μg/mL. The cells are incubated for 15-30 minutes at 37° C.

[1040] After the initial incubation with antibody, EGF (RnD Systems, catalog no. 236-E) (100 μg/mL) is added separately to the cells in the same buffer as the antibody. Control cells also are tested where no antibody is added (EGF only) or where no antibody or EGF is added (no Rx). The cells are incubated for 15-30 minutes at 37° C. After incubation with the antigen, the cells are washed with cold PBS, and cold lysis buffer (1% NP-40 Alternative, 20 mM Tris (pH 8.0), 137 mM NaCl, 10% glycerol, 2 mM EDTA, 1 mM activated sodium orthovanadate, 10 μg/mL Aprotinin, 10 μg/mL Leupeptin) is added. The lysate is collected and assayed immediately or stored at ≦−70° C. for subsequent analysis.

[1041] 2. ELISA

[1042] A 96 well Microplate (Costar #2592) is coated with rat anti-human anti-phospho EGFR capture antibody (8.0 μg/mL in PBS, 100 μL/well) (R&D Systems #842428) overnight at room temperature. Each well is aspirated, and washed with wash buffer (0.05% TWEEN® 20 in PBS, pH 7.2-7.4 (R&D Systems # WA126) for a total of five washes. Plates are blocked for 1-2 hours at room temperature with 300 μL of Block Buffer (1% BSA, 0.05% NaN₃ in PBS, pH 7.2-7.4). The wells are aspirated and washed with wash buffer for a total of five washes. Cell lysate (Cetuximab, anti-EGFR antibody Y104E variant antibody, EGF only or No Rx) is diluted in IC Diluent (1% NP-40 Alternative, 20 mM Tris (pH 8.0), 137 mM NaCl, 10% glycerol, 2 mM EDTA, 1 mM activated sodium orthovanadate) and 100 μL are added. The aspiration and wash steps are repeated, and 100 μL mouse anti-human phospho-EGF R (Y1068) antibody conjugated to HRP (20 mM Tris (pH 8.0), 137 mM NaCl, 0.05% TWEEN® 20, 0.1% BSA) is added. Plates are sealed and incubated for 2 hours at room temperature. The aspiration and wash steps are repeated. Substrate (1:1 mixture of H₂O₂ and Tetramethylbenzidine (R&D Systems, Catalog # DY999)) (100 μL) is added to each well and the plate is incubated for 20 minutes at room temperature. Stop solution (2 N H₂SO₄ (R&D Systems, Catalog # DY994) (50 μL) is added, and the optical density (OD) of the wells is measured immediately in a microplate reader set to 450 nm with a wavelength correction at 540 nm or 570 nm

### Example 9

### Growth of Human and Neonatal Keratinocytes in the Presence of Cetuximab or HC-Y104E Anti-EGFR Antibody

[1043] The growth of Human neonatal keratinocytes (Invitrogen C-001-5C) and Human adult keratinocytes (Invitrogen C-005-5C) is measured after incubation with Cetuximab or anti-EGFR antibody containing HC-Y104E variant. The antibody to be tested is added to normal growth medium (10% FBS, DMEM (pH 7.4)) to a concentration of 10 μg/mL, 3.33 μg/mL, 1.11 μg/mL, 0.37 μg/mL, 0.123 μg/mL, 0.0411 μg/mL, 0.0137 μg/mL and 0.00457 μg/mL.

[1044] Human neonatal keratinocytes and human adult keratinocytes are added (1000 cells/well) to a 96-well plate (BD Falcon 35-3072) in the presence of the normal growth medium containing Cetuximab or anti-EGFR antibody containing HC-Y104E variant. Each condition is assayed in 5 replicate wells (i.e., n=5 per condition). Cells are incubated for 5 days at 37° C. in a humidified atmosphere of 5% CO₂ incubator. Cell growth is measured by CellTiter-Glo® Luminescent Cell Viability Assay (Promega Cat# G-7571) and expressed as percent surviving cells compared to control cells grown without antibody.

### Example 10

### Effects of Cetuximab or Anti-EGFR Antibody Containing HC-Y104E Variant on Tumor Growth in Xenograft Models

[1045] A431 epidermoid carcinoma cells, FaDu hypopharyngeal carcinoma cells, and engineered cell lines A431LDHA and A431CA9, derived from A431 cells, are used to generate xenograft tumor models, which are used to evaluate the antitumor activity of Cetuximab and an anti-EGFR antibody containing HC-Y104E variant.

[1046] 1. Subcutaneous A431 Tumors

[1047] Male, athymic NCr-nu/nu mice are inoculated with a 0.1 mL subcutaneous (SC) injection of 3.3×10⁶ A431 epidermoid carcinoma cells (ATCC CRL1555) suspended in RPMI-1640 medium into their right flanks. When the tumors reach a size of ˜100 mm³, animals are randomized into five study groups (n=4/group): (1) Group 1—vehicle (Cetuximab buffer), (2) Group 2—0.1 mg/mouse (4 mg/kg body weight) Cetuximab, (3) Group 3—1.0 mg/mouse (40 mg/kg body weight) Cetuximab, (4) Group 4—0.1 mg/mouse (4 mg/kg body weight) HC-Y104E variant anti-EGFR antibody, or (5) Group 5-1.0 mg/mouse (40 mg/kg body weight) HC-Y104E variant anti-EGFR antibody. Mice are intraperitoneally (IP) administered 0.1 mg or 1.0 mg of Cetuximab reference or HC-Y104E variant anti-EGFR antibody variant or vehicle control twice weekly on days 0, 4, 7, 11, and 14. Tumor growth is measured as described above on days 0, 4, 7, 11, 14 and 18, except that animals treated with only vehicle are sacrificed on day 14.

[1048] Tumor Growth Inhibition (TGI) for the Cetuximab or HC-Y104E variant anti-EGFR antibody treatment groups is calculated using the formula: % TGI=[1−(T_{B}−T_{A})/(C_{B}−C_{A})]×100; where T_{B} is the average tumor volume (mm³) in the treatment group at 14 days after initiation of treatment, T_{A} is the average tumor volume (mm³) in the treatment group at day 0 before treatment, C_{B} is the average tumor volume in the control group at 14 days after initiation of treatment, and C_{A} is the average tumor volume in the control group at day 0 before treatment (see, e.g., Teicher B A and Andrews P A: Anticancer Drug Development, Guide: Preclinical Screening, Clinical Trials and Approval, 2^{nd} edition. Humana Press, Totowa, N.J., pp. 134, 2004 and T. Friess et al., (2006) Anticancer Research 26:3505-3512). TGI is then compared across the wild-type Cetuximab and HC-Y104E variant anti-EGFR antibodies.

[1049] 2. Subcutaneous FaDu Tumors:

[1050] Male, athymic NCr-nu/nu mice are inoculated with a 0.1 mL subcutaneous (SC) injection of 5.0×10⁶ FaDu hypopharyngeal carcinoma cells (ATCC) suspended in RPMI-1640 medium into their right flanks. When the tumors reach a size of ˜100 mm³, animals are randomized into five study groups (n=4/group): (1) Group 1—vehicle (Cetuximab buffer), (2) Group 2—4 mg/kg Cetuximab, (3) Group 3—40 mg/kg Cetuximab, (4) Group 4—4 mg/kg HC-Y104E variant anti-EGFR antibody, or (5) Group 5—40 mg/kg HC-Y104E variant anti-EGFR antibody. The antibodies or vehicle only are administered intraperitoneally (IP) twice weekly on days 0, 3, 7, and 10. Tumor growth is measured using calipers as described above on days −1, 3, 7, 10, 14 just prior to antibody administration. Tumor growth inhibition is then compared across the antibodies evaluated

### Example 11

### EGFR Expression in Subcutaneous Tumors and in Primate Skin

[1051] Detection of EGFR in subcutaneous xenograft tumors and in harvested primate skin was confirmed and assessed by immunohistochemistry (IHC).

[1052] a. EGFR Expression in Subcutaneous Tumors

[1053] Immunohistochemistry (IHC) was used to assess the levels of EGFR expression in A431 human tumors grown as xenografts in nude mice as described in Example 10.1. A431 subcutaneous tumors were harvested and fixed in 10% neutral buffered formalin (NBF) and embedded in paraffin. Five (5) μm sections were mounted on slides and dried. Prior to staining, the slides were deparaffinized and rehydrated. Sections were immunolabeled using an EGFR IHC kit (Dako, Carpinteria, Calif.). Staining was visualized with 3,3′-diaminobenzidine (DAB) according to the manufacturer's instructions. Nuclei were counterstained with hematoxylin. Micrographs were captured with a Nikon Eclipse TE2000U microscope coupled to a Insight FireWire digital camera (Diagnostic Instruments, Michigan). The intense cell membrane positivity for EGFR in the tumor cells confirmed that xenograft tumors derived from A431 cells retain high levels of EGFR expression.

[1054] b. EGFR Expression in Primate Skin

[1055] Immunohistochemistry (IHC) was used to assess the levels of EGFR expression in human and non-human primate skin samples. Human skin samples were obtained from a local surgical center; cynomolgus monkey, marmoset monkey and squirrel monkey skin were received from Worldwide Primates Inc.(Miami, Fla.). Formaldehyde fixed samples of human, cynomolgus monkey, marmoset monkey and squirrel monkey were sectioned and processed for IHC with the EGFR IHC kit (DAKO) as described above. Nuclei were counterstained with hematoxylin. Micrographs were captured above, with 20× and 40× objectives.

[1056] As expected, the membranes of the basal keratinocytes exhibited intense staining for EGFR. The basal keratinocytes of cynomolgus and squirrel monkey skin tissues also exhibited staining, with the cynomolgus skin staining with slightly less intensity than that observed for human and squirrel monkey tissues. The marmoset monkey skin did not exhibit any detectable staining, even when using a 40× objective. These results indicate that cynomolgus monkey and squirrel monkey EGFR, but not Marmoset monkey EGFR, are sufficiently similar to human EGFR to be recognized by the anti-human EGFR monoclonal antibody.

### Example 12

### Binding of an Anti-EGFR Antibody Containing HC-Y104E Variant to A431 Subcutaneous Tumors or Skin Grafts Ex Vivo

[1057] HC-Y104E mutant antibody binding to subcutaneous tumors and primate skin grafts in vivo are evaluated, since EGFR is expressed in subcutaneous tumors and primate skin as described in the previous Example.

[1058] 1. Ex Vivo Binding Studies to Subcutaneous Tumors

[1059] Immunofluorescence (IF) is used to assess and compare the abilities of Cetuximab and HC-Y104E variant anti-EGFR antibodies to bind human EGFR. Cetuximab and HC-Y104E Anti-EGFR antibodies are conjugated to DyLight⁵⁹⁴ at 10, 5, 1, 0.3, 0.1 μg/mL in PBS using the DyLight 594 Antibody Labeling Kit (Thermo Scientific; Rockford, Ill.), according to the manufacturer's instructions. Following sectioning, frozen sections of A431 tumors are fixed for 10 min in cold acetone and incubated for one hour with 5 mg/mL or 1 μg/mL of either DyLight⁵⁹⁴-conjugated Cetuximab or HC-Y104E antibody. After washing in PBS, sections are counter-stained with DAPI (4′,6-Diamidino-2-Phenylindole, Dihydrochloride) (Molecular Probes, Eugene). Micrographs are captured, with 20× and 40× objectives, using a Nikon Eclipse TE2000U microscope coupled to a Insight FireWire digital camera (Diagnostic Instruments, Michigan) using the same settings for each image to allow for comparison between experimental conditions. EGFR binding is then compared across antibodies.

[1060] 2. Ex Vivo Binding Studies to Primate Skin

[1061] Immunofluorescence (IF) is used to assess the ability of Cetuximab and HC-Y104E variant antibodies to bind human EGFR in various primate skin samples. Cryosections of human, cynomolgus monkey, marmoset monkey and squirrel monkey (human skin received from a local surgical center; cynomolgus monkey, marmoset monkey and squirrel monkey skin received from Worldwide Primate, Florida), are directly immunolabeled at neutral pH as described above, using 1.0 μg/mL Cetuximab or HC-Y104E variant conjugated to Alexafluor 594 (Thermo Scientific DyLight 594 Antibody Labeling Kit; Rockford, Ill.). Nuclei are counterstained with DAPI. Micrographs are captured as described above, using 20× and 40× objectives Immunolabeling of pre-keratinocytes and basal cells is then visually assessed and compared across antibodies.

### Example 13

### Selective Binding of Fluorescently-Labeled HC-Y104E Mutant Anti-EGFR Antibodies to Tumors Versus Skin In Vivo

[1062] Cetuximab, HC-Y104E variant anti-EGFR antibodies, and a control Human IgG are labeled at room temperature for 60 minutes with DyLight755 Sulfydryl-Reactive Dye (DL755) (Thermo Scientific, Rockford, Ill.), a near-IR fluor. The binding of DL755 labeled IgG, Cetuximab, and HC-Y104E mutant antibodies to xenograft tumors or human or monkey skin grafts is assessed using the IVIS Caliper fluorescent imaging system with an excitation wavelength of 745 nm and an emission wavelength of 800 nm Images are captured before administration of antibody and at 1 minute, 2 minutes, 10 minutes, 60 minutes, 120 minutes, 240 minutes, 360 minutes, 1 day, and daily after administration of the antibodies. In the human skin graft models, images also are captured at 10 days post administration of the antibodies.

[1063] 1. Cetuximab and HC-Y104E Binding to Subcutaneous A431 Tumors

[1064] a. Whole Animal Imaging

[1065] A431 xenograft tumors are produced by injecting A431 cells into the right flanks of nude mice as described in Example 10 above. Twenty-one (21) days post-implantation, the mice are administered 10 μg/mouse (0.5 mg/kg) Human IgG^{DL755}, HC-Y104E variant^{DL755}, or Ceuximab^{DL755}. The DL755 label is detected, in 2-4 animals/group, using the IVIS Caliper fluorescent imaging system with an excitation wavelength of 745 nm and an emission wavelength of 800 nm Images are captured before administration of antibody and at 4 hr after administration of the antibodies, and then daily for 7 days. The binding demonstrated by the HC-Y104E mutant antibodies are then compared to that of Cetuximab^{DL755} and the negative control antibody, human IgG^{DL755}.

[1066] b. Whole Animal Imaging and Immunohistochemistry

[1067] As described above, nude mice are injected with A431 cells in the right flanks to generate A431 tumors. On day 21 post-A431 cell implantation, the mice are administered a single i.v. dose of IgG^{DL755}, HC-Y104E variant^{DL755}, or Cetuximab^{DL755} at 1 mg/mouse in at least 2 mice per group. 48 hr after the dose of antibody, the tumors are visualized using the IVIS Caliper fluorescent imaging system as described above.

[1068] Following tumor imaging, immunohistochemical staining of human IgG^{DL755}, HC-Y104E variant^{DL755}, and Ceuximab^{DL755}-injected mice, by F_{c} detection is performed to assess the localization of antibody binding in more detail. After imaging, the mice are perfused, the tumors are harvested, and cryosections of the tumor are incubated with HRP-conjugated goat anti-human IgG secondary antibody for detection of the F_{c} regions of the injected antibodies using standard immunohistochemical staining methods, using DAB as the HRP substrate to enable visualization. The stained tissues are examined using a Nikon Eclipse TE2000U microscope coupled to an Insight FireWire digital camera (Diagnostic Instruments, Michigan) equipped with a 20× objective.

[1069] 2. Cetuximab and HC-Y104E Binding to Subcutaneous PC-3 Tumors

[1070] Xenograft tumors derived from PC-3 cells are generated by injecting 2×10⁶ PC-3 cells (Caliper Life Sciences), in 100 μl serum-free Opti-MEM®, into the right peritibial muscle of male nude mice. 35 days after implantation, the PC-3 tumor bearing mice are administered 10 μg/mouse (0.5 mg/kg) human IgG^{DL755}, HC-Y104E variant^{DL755}, or Ceuximab^{DL755} (n=at least 2/group), and the DL755 label is detected using the IVIS Caliper fluorescent imaging system as described above. Images are captured before administration of antibody and then daily for 5 days. A parallel immunohistochemical study also is performed on the PC-3 xenograft tumors, 48 hours following i.v. administrations of human IgG (control), HC-Y104D, or Cetuximab (1 mg/mouse) by F_{c} detection as described above.

[1071] 3. Binding of Cetuximab and HC-Y104E Anti-EGFR Antibodies to Human Skin Grafts

[1072] As a model to assess skin toxicity, binding of HC-Y104E variant anti-EGFR antibodies to human and monkey skin grafts implanted in mice is assessed in vivo. HC-Y104E variant anti-EGFR antibodies, Cetuximab and Human IgG, as positive and negative controls, respectively, are labeled at room temperature for 60 minutes with DyLight755 Sulfydryl-Reactive Dye (DL755) (Thermo Scientific, Rockford, Ill.), a near-IR fluor. Human split thickness skin graft (STSG) (human skin received from a local surgical center) and human foreskin grafts (purchased from NDRI (1628 JFK Blvd, 8 Penn Center, Philadelphia, Pa.) are surgically transplanted on the left dorsal flank in Ncr nu/nu mice. EGFR expression is confirmed in the human skin grafts on days 70 and 32 post implantation, respectively, by anti-EGFR IHC kit (Dako). On day 32 and day 36 post-implantation, the labeled antibodies are administered by i.v. to mice with human skin grafts at a dose of 300 μg/mouse. Images of DL755 signal are taken on each of days 1-10 post administration, and visual assessment is used to evaluate and compare circulating systemic signal and localization of signal to the skin graft locations.

[1073] In another study, on day 21 post implantation, mice receiving human foreskin grafts are analyzed for antibody binding, using the same method (n=3/group), before and 4 hr after intravenous administration of 10 μg/mouse (0.5 mg/kg) human IgG^{DL755}, HC-Y104E variant^{DL755}, or Cetuximab^{DL755} and then daily thereafter for a total of 6 days.

[1074] On day 28 post-implantation, the binding the antibodies to the human foreskin skin grafts is assessed by immunohistochemistry using standard methods. Mice receiving human foreskin grafts are administered a single i.v. dose of IgG, Y104E variant, or Cetuximab at 1 mg/mouse. 48 hr after the dose of antibody, the mice are perfused and cryosections are incubated with HRP-conjugated goat anti-human IgG secondary antibody. DAB is used as the HRP substrate. The stained tissues are examined using a Nikon Eclipse TE2000U microscope coupled to a Insight FireWire digital camera (Diagnostic Instruments, Michigan) equipped with a 40× objective.

[1075] 4. Binding of Cetuximab and HC-Y104E Anti-EGFR Antibodies to Monkey Skin Grafts

[1076] Monkey STSG (cynomolgus monkey skin received from BioTox) are surgically transplanted on the left dorsal flank in 7 Ncr nu/nu mice. EGFR expression is confirmed in the monkey skin grafts on days 70 and 32 post implantation, respectively, by anti-EGFR IHC kit (Dako). On day 32 and day 36 post-implantation, the DL755-labeled antibodies, described above, are administered by i.v. to mice with monkey skin graft models at a dose of and 30 μg/mouse. Circulating and localized fluorescence signal is detected and images captured as described above on each of 1-9 days post antibody administration.

[1077] 5. A431 Tumor Vs. Skin Binding

[1078] Quantified fluorescent signal intensities are used to determine the ratio of tumor:skin binding for Cetuximab and HC-Y104E mutant antibodies by dividing the DL755 signal intensity of the tumor binding, determined in part 1 of this Example, by the corresponding DL755 signal intensity of the human skin graft binding from the same antibody determined in part 2 of this Example (n=at least 2/group). The ratios are then normalized to the tumor:skin binding ratio calculated for the control IgG-administered animals.

### Example 14

### Effects of Cetuximab on Skin Toxicity in a Skin Graft Model

[1079] Donor skin from the palpebral fissure of a patient is harvested and split thickness skin grafts are transplanted to 4 Ncr nu/nu mice. Starting on day 15 post skin transplantation, two of the mice are each intravenously administered 2 mg HC-Y104E antibody variant or Cetuximab (100 mg/kg, HED 60 mg/kg) twice weekly for 4 weeks. On day 35 post-antibody administration (i.e., 7 days after the final dose of antibody) the condition of the skin grafts is visually assessed, for example, for shrinking of the graft and/or local irritation (e.g., redness, dryness). Samples of donor skin and grafted skin, containing both the human donor skin graft and the adjacent skin of the host mouse, are then collected and analyzed by immunohistochemistry using the anti-EGFR IHC kit (Dako). Staining in the pre-karatinocytes and basal cells in the human skin graft is compared to the staining in the pre-karatinocytes and basal cells of the adjacent skin native to the host mouse.

### Example 15

### Cetuximab and Chemotherapy Combinatorial Treatment

[1080] The efficacy of Cetuximab in combination with the chemotherapeutic reagent, cisplatin, was evaluated for the inhibition of A431 xenograft tumor growth.

[1081] Subcutaneous A431 xenograft tumors were established in male nude mice as described in Example 10 above. When the tumors were approximately 100-200 mm³ in size, animals were randomized into nine study groups (n=5/group), as set forth in Table 36, and administered Cetuximab by intraperitoneal administration twice per week and/or cisplatin twice per week by intravenous administration. Specifically, the test article(s) were administered on days 0, 4, 7, 11, and 14.

TABLE 36
Cetuximab and/or Cisplatin Dose and Resulting Tumor Growth Inhibition

| | | Cetuximab Dose | | Cisplatin Dose | | % Tumor Growth |
|---|---|---|---|---|---|---|
| Group | Test Article(s) | mg/mouse | mg/kg | mg/mouse | mg/kg | Inhibition |
| 1 | Vehicle | — | — | — | — | — |
| 2 | Cetuximab | 0.1 | 4 | — | — | 41.8 |
| 3 | Cetuximab | 0.3 | 12 | — | — | 65.9* |
| 4 | Cisplatin | — | — | 0.04 | 1.5 | 16.7 |
| 5 | Cisplatin | — | — | 0.125 | 5 | 34.2* |
| 6 | Cetuximab + Cisplatin | 0.1 | 4 | 0.04 | 1.5 | 53.2* |
| 7 | Cetuximab + Cisplatin | 0.1 | 4 | 0.125 | 5 | 50.2* |
| 8 | Cetuximab + Cisplatin | 0.3 | 12 | 0.04 | 1.5 | 74.1* |
| 9 | Cetuximab + Cisplatin | 0.3 | 12 | 0.125 | 5 | 85.2* |

*= p < 0.05 vs. vehicle only

[1082] Tumor growth, measured as tumor volume (mm³), was determined on days 1, 4, 7, 11 and 14 using digital calipers and calculation as described in Example 10. Tumor growth inhibition (TGI) for the treatment groups was calculated using the formula: % TGI=[1−(T_{B}−T_{A})/(C_{B}−C_{A})]×100; where T_{B} is the average tumor volume (mm³) in the treatment group at day 14, T_{A} is the average tumor volume (mm³) in the treatment group the day before the first treatment (day −1), C_{B} is the average tumor volume in the vehicle only control group at day 14, and C_{A} is the average tumor volume in the vehicle only control group the day before the first treatment (day −1) (see, e.g., Teicher B A and Andrews P A: Anticancer Drug Development, Guide: Preclinical Screening, Clinical Trials and Approval, 2^{nd} edition. Humana Press, Totowa, N.J., pp. 134, 2004 and T. Friess et al., (2006) Anticancer Research 26:3505-3512). The results are set forth in Table 36 above.

[1083] While 1.5 mg/kg cisplatin did not significantly inhibit tumor growth on its own, it did contribute to additional tumor growth inhibition when in combination with Cetuximab at 4 mg/kg (41.8% TGI for Cetuximab alone vs. 53.2% TGI for the combination) and at 12 mg/kg (65.9% TGI for Cetuximab alone vs. 74.1% TGI for the combination). Treatment with 5 mg/kg cisplatin alone resulted in 34.2% TGI and further contributed to TGI when in combination with Cetuximab at 4 mg/kg (41.8% TGI for Cetuximab alone vs. 50.2% TGI for the combination) and at 12 mg/kg (65.9% TGI for Cetuximab alone vs. 85.2% TGI for the combination). The maximum tumor growth inhibition was observed with 12 mg/kg Cetuximab+5 mg/kg cisplatin.

### Example 16

### Cetuximab Vs. HC-Y104E Variants and Chemotherapy Combinatorial Treatment

[1084] The efficacy of Cetuximab versus HC-Y104E anti-EGFR variants in combination with the chemotherapeutic reagent cisplatin, are evaluated for the inhibition of A431 xenograft tumor growth.

[1085] Subcutaneous A431 xenograft tumors are established in male nude mice as described above. When the tumors are approximately 100 mm³ in size, animals are randomized into study groups (n=5/group), and administered Cetuximab or HC-Y104E-containing variant (Y104E), by IP administration, and/or cisplatin, by IV administration, twice per week, as indicated in Table 37 below. Specifically, the test article(s) are administered on days 0, 4, 7 and 11. Tumor volume (mm³) is determined on days −1, 4, 7, 11 and 14 as described previously.

TABLE 37
Cetuximab, HC-Y104D and/or Cisplatin Dose

| | | Cetuximab Dose | | HC-Y104E Dose | | Cisplatin Dose | |
|---|---|---|---|---|---|---|---|
| Group | Test Article(s) | mg/mouse | mg/kg | mg/mouse | mg/kg | mg/mouse | mg/kg |
| 1 | Vehicle | — | — | — | — | — | — |
| 2 | Cetuximab | 0.3 | 12 | — | — | — | — |
| 3 | Cisplatin | — | — | — | — | 0.125 | 5 |
| 4 | Y104E | — | — | 0.3 | 12 | — | — |
| 5 | Y104E | — | — | 1.0 | 40 | — | — |
| 6 | Cetuximab + Cisplatin | 0.3 | 12 | — | — | 0.125 | 5 |
| 7 | Y104E + Cisplatin | — | — | 0.3 | 12 | 0.125 | 5 |
| 8 | Y104E + Cisplatin | — | — | 1.0 | 40 | 0.125 | 5 |

### Example 17

### Effect of Anti-EGFR Antibody-Drug Conjugates (ADCs) on Tumor Cell and Keratinocyte Cell Growth Inhibition

[1086] Anti-EGFR antibody-drug conjugates (ADCs) are generated by fusing the immunotoxin Saporin to Cetuximab or HC-Y104E variant anti-EGFR antibody by either mixing biotinylated antibodies and streptavidin-Saporin (Advanced Targeting Systems Bio, Cat# IT-27) or using a cleavable protein cross-linker (service provided by Advanced Targeting Systems Bio) to permit drug release inside the target cells.

[1087] For biotin-streptavidin based ADC formation, antibodies at a concentration of 1-2 mg/ml in 0.1 M phosphate buffer, pH 7.2 are oxidized, converting adjacent hydroxyl groups of the antibody sugar chains into aldehyde groups, using sodium periodate (NaIO₄) at a final concentration of 5 mg/ml, 4° C. for 30 min. The oxidized antibodies are then dialyzed against 0.1 M phosphate buffer, pH 7.2, and the dialyzed antibodies are mixed with 50 mM hydrazide-biotin prepared in DMSO at volume ratio 9 to 1, resulting in 5 mM hydrazide-biotin in the reaction. The mixture is incubated at room temperature for 2 hours to form hydrazone bonds between the aldehyde groups of the antibodies and hydrazide groups. The biotinylated antibodies are then dialyzed against 1×PBS, and then mixed with streptavidin-saporin in an equal molar ratio to form the antibody-saporin complex. The ADCs are then tested for their abilities to inhibit cell growth of human tumor cell lines, A431 and MDA-MB-468, and a human keratinocyte cell line, HEK-N.

[1088] 1. Saporin ADC Inhibition of A431 Cell Growth

[1089] A431 cells are cultured in RPMI 1640 medium supplemented with 10% fetal bovine serum (FBS; Mediatech). The day before ADC treatment, A431 cells are seeded at 1,000 cells/well in 200 μL volume in clear bottom white 96-well plates. The cells are left untreated or are treated with the Saporin conjugated Cetuximab (Wt-Sap), Saporin conjugated HC-Y104E variant (Y104E-Sap), or Saporin-conjugated human IgG at increasing concentrations starting from 1 μg/mL. The cells are subjected to ADC treatment for 5 days. Live cells are measured on day 5 using the Cell Titer-glo Luminescent kit (Promega) according to the manufacturer's instructions. The percentages of surviving cells are calculated relative to untreated cells and EC₅₀ values are computed using GraphPad Prism.

[1090] 2. Saporin ADC Inhibition of Neonatal Keratinocyte (HEK-N) Cells

[1091] Neonatal Keratinocyte (HEK-N) cells are cultured in growth factor supplemented Epilife medium (Gibco). The day prior to Saporin ADC treatment, HEK-N cells are seeded at 1,000 cells/well in 200 μL volume in clear bottom white 96-well plates. The cells are left untreated or are treated with the Saporin conjugated Cetuximab (Wt-Sap), Saporin conjugated HC-Y104E variant (Y104E-Sap), or Saporin-conjugated human IgG at increasing concentrations starting from a concentration of 1 μg/mL. The cells are subjected to ADC treatment for 5 days. Live cells are measured on day 5 using the Cell Titer-glo Luminescent kit (Promega) according to the manufacturer's instructions. The percentages of surviving cells are calculated relative to untreated cells and EC₅₀ values were computed using GraphPad Prism.

### Example 18

### Effect of Y104D-DM1, Y104D-MMAE and Y104D-MMAF Antibody-Drug Conjugates (ADCs) on A431 Subcutaneous Tumor Growth In Vivo

[1092] An A431 tumor xenograft model, which is a model of EGFR+ tumors, was used to assess the tumor growth inhibition activity of antibody drug conjugates (ADCs) of HC-Y104D variant anti-EGFR antibody. In particular, HC-Y104D variant anti-EGFR antibody conjugates containing the cytotoxic drugs maytansinoid DM1, monomethyl auristatin E (MMAE), or monomethyl auristatin F (MMAF) were generated and each assessed in this model. DM1 and MMAE have a comparable potency of 10 pM to 1 nM, and MMAF has a potency of 10 nM to 100 nM (“Second-Generation ADCs.” Biological Drug Products: Development and Strategies. Ed. Wei Wang, Ed. Manmohan Singh. ISBN: 978-1-118-14889-1, 2013. Section 9.4.2.3).

### 1. HC-Y104D Variant Anti-EGFR Antibody Conjugated to Maytansinoid DM1 (Y104D-DM1)

[1093] a. Generation of Y104D-MCC-DM1 (Y104D-DM1)

[1094] HC-Y104D antibodies were conjugated to the maytansinoid, DM1, via a non-cleavable succinimidyl-4-(N-maleimidomethyl)cyclohexane-1-carboxylate (SMCC) linker. To generate Y104D-DM1 ADCs, 2.5 mL of Y104D, generated as described in Example 2, was loaded onto a PD-10 desalting column (GE Health) that was pre-equilibrated with Conjugation Buffer 1 (50 mM Potassium Phosphate/50 mM Sodium Chloride, pH 6.5, 2 mM EDTA). The sample was followed with 0.5 mL Conjugation Buffer 1, and the de-salted antibody was collected. The concentration of the antibody was measured and adjusted to 20 mg/mL.

[1095] A Y104D-MCC conjugate was first generated by adding 10 mM SMCC in Dimethylacetamide (DMA) to the antibody solution at a 7:1 molar ratio (0.933 mL of 10 mM SMCC to 10 mL of 20 mg/mL antibody solution). DMA was then added to the mixture to achieve 10% v/v DMA. The mixture was then incubated at room temperature for 2 hr. The Y104D-MCC conjugate was loaded onto pre-equilibrated PD-10 desalting column. The sample was followed with 0.5 mL Conjugation Buffer 1, and the de-salted antibody was collected. The concentration of the conjugate was calculated using the A₂₈₀ of the eluate (ε=1.45 mg⁻¹ cm⁻¹, or 217500 M⁻¹ cm⁻¹).

[1096] The average number of SMCC molecules per antibody was determined by indirect measurement, by determining the reduction of free thiol groups in the solution. 5 μL buffer or Y104D-MCC were added to 5 μL 1 mM cysteine in a microcentrifuge tube, followed by 1 mM Ellman's reagent (5,5′-dithiobis-(2-nitrobenzoic acid) or DTNB) in PBS (diluted from 0.1 M in DMSO stock). After vortexing, the mixtures were incubated at room temperature for 5 min. The absorbance was measured at 280 nm and 412 nm, and the concentration was calculated using the A280 and the extinction coefficient, ε=210,863 cm⁻¹M⁻¹. The cysteine concentration in the buffer only sample was determined using the extinction coefficient of the chromophore, 5-mercapto-2-nitrobenzoic acid (ε=13,600 cm⁻¹M⁻¹). The linker concentration was determined to be the difference between the buffer and the Y104D-MCC sample, which was approximately an average of 4.5 SMCC molecules per antibody.

[1097] The Y104D-MCC-DM1 conjugate, designated Y104D-DM1 was generated by mixing 1.7 equivalents of 10 mM DM1-SH in DMA to Y104D-MCC, diluted to 10 mg/mL Conjugate Buffer 1. DMA was added to yield a final DMA concentration of 10% v/v, and the reaction mixture was incubated overnight at room temperature (25° C.). The Drug Antibody Ratio (DAR) of Y104D-MCC-DM1 was calculated using the absorbance at 252 nm and 280 nm and an extinction coefficient of ε=1.48 mg⁻¹ cm⁻¹. The average number of DM1 molecule per antibody was 4.6.

[1098] Aggregation also was monitored by SEC-HPLC after each conjugation step. Prior to conjugation, the Y104D antibody contained about 1% high MW protein. The Y104D-MCC-DM1 conjugate typically contained about 1-15% high MW protein. The final Y104D-DM1 conjugate typically contained about 1-15% high MW protein.

[1099] b. Tumor Growth Inhibition Activity of Y104D-DM1

[1100] Male, athymic NCr-nu/nu mice were inoculated with a 0.1 mL subcutaneous (SC) injection of 3.3×10⁶ A431 epidermoid carcinoma cells (ATCC CRL1555) suspended in RPMI-1640 medium into their right flanks. When the tumors reached a size of ˜100 mm³, the animals were randomized into five study groups: (1) Group 1—vehicle (8.48 mg/mL Sodium Chloride, 1.88 mg/mL Sodium Phosphate Dibasic Heptahydrate, 0.42 mg/mL Sodium Phosphate Monobasic Monohydrate in sterile water) (n=8), (2) Group 2—unconjugated Y104D, administered at 5 mg/kg body weight twice weekly, by intraperitoneal injection, on days 0, 3, 7, and 10 (n=8), (3) Group 3—Y104D-DM1, administered at 1.0 mg/kg body weight by a single intravenous dose on day 0 (n=6), (4) Group 4—Y104D-DM1, administered at 5.0 mg/kg body weight by a single intravenous dose on day 0 (n=6), or (5) Group 5—Y104D-DM1, administered at 10.0 mg/kg body weight by a single intravenous dose on day 0 (n=6). Tumor growth was measured, as described above in Example 10, on days 0, 3, 7, 10 and 13. Tumor Growth Inhibition (TGI) was calculated as described above, based on measurements on day 13.

[1101] The results are set forth in Table 38 below. The results show there was a decreased rate of tumor growth in all animals treated with Y104D or Y104D-DM1 compared to vehicle alone. Treatment with Y104D alone, which was administered twice weekly, resulted in 26.5% TGI at day 13. The Y104D-DM1 conjugates, which were only administered one time by a single intravenous injection, resulted in a TGI at day 13 that were 32.6%, 10.0% and 20.4% for 1.0 mg/kg, 5.0 mg/kg and 10.0 mg/kg, respectively. Based on 2way-ANOVA with Dunnet post test, the observed TGI of the Y104D-DM1 treatment groups were not significantly different from one another.

TABLE 38
Y104D-DM1 Effect on Tumor Growth

| | Vehicle | | Y104D | | Y104D-DM1 | | | | | |
|---|---|---|---|---|---|---|---|---|---|---|
| Time | — | | 5.0 mg/kg | | 1.0 mg/kg | | 5.0 mg/kg | | 10.0 mg/kg | |
| (Days) | AVG | StDev | AVG | StDev | AVG | StDev | AVG | StDev | AVG | StDev |
| 0 | 136.96 | 36.05 | 132.25 | 31.24 | 144.48 | 42.24 | 135.68 | 35.68 | 135.09 | 37.01 |
| 3 | 371.98 | 121.08 | 227.91 | 77.18 | 307.83 | 113.46 | 325.16 | 53.79 | 265.30 | 84.06 |
| 7 | 702.80 | 194.15 | 469.96 | 162.93 | 479.39 | 176.36 | 542.92 | 96.45 | 460.42 | 93.48 |
| 10 | 842.46 | 252.91 | 671.37 | 249.11 | 669.94 | 234.76 | 744.05 | 236.33 | 672.79 | 117.07 |
| 13 | 1054.35 | 273.15 | 806.44 | 372.34 | 762.95 | 319.13 | 961.04 | 239.01 | 865.22 | 214.77 |

### 2. HC-Y104D Variant Anti-EGFR Antibody Conjugated to Monomethyl Auristatin E (MMAE) (Y104D-MMAE)

[1102] a. Generation of Y104D-Mc-VcPAB-MMAE (Y104D-MMAE)

[1103] Y104D antibody, generated as described in Example 2, was conjugated to MMAE via the cleavable linker maleimidocaproyl-valine-citruline-p-aminobenzyl linker (maleimidocaproyl-vcPAB-MMAE) as described in Francisco et al. Blood 102:1458-1465 (2003). Endogenous disulfides within the antibody were briefly reduced and conjugated to the maleimidocaproyl moiety to create the antibody-drug conjugate, designated Y104D-MMAE. The final conjugated product had a drug:antibody (DAR) ratio of approximately 4 as assessed by hydrophobic interaction chromatography. Typically, high molecular weight material corresponded to approximately 1-2% of the total prep. In addition, the unconjugated protein corresponded to approximately 1-2% of the intact IgG.

[1104] b. Tumor Growth Inhibition Activity of Y104D-MMAE

[1105] Mice with A431 xenograft tumors were generated as described above, except the tumors were allowed to reach a size of ˜350 mm³ before treatment. When the tumors reached a size of ˜350 mm³, the animals were randomized into four study groups: (1) Group 1—vehicle (8.48 mg/mL Sodium Chloride, 1.88 mg/mL Sodium Phosphate Dibasic Heptahydrate, 0.42 mg/mL Sodium Phosphate Monobasic Monohydrate in sterile water) (n=6), (2) Group 2—Y104D-MMAE, administered at 1.5 mg/kg body weight (n=6), (3) Group 3—Y104D-MMAE, administered at 5 mg/kg body weight (n=6), and (4) Group 4—Y104D-MMAE, administered at 15 mg/kg body weight (n=6). Due to the increased starting size of the tumors, all treatments were administered by intravenous injection, biweekly on days 0, 3, 7, and 10. Tumor growth was measured as described above on days −1, 2, 6, 10, 14 and 17.

[1106] The results are set forth in Table 39 below. Mice administered vehicle only exhibited progressive tumor growth over the course of the study. Mice receiving 1.5 mg/kg Y104D-MMAE exhibited a decreased rate in tumor growth compared to the vehicle control. At the higher doses of Y104D-MMAE, there was a substantially reduced tumor growth compared to vehicle control. For example, the tumors of mice that were administered 5 or 15 mg/kg Y104D-MMAE exhibited tumor growth reduction with regression of tumor size back to the baseline volume. Tumor growth inhibition (TGI) at Day 17, relative to vehicle, was 34.2% for 1.5 mg/kg Y104D-MMAE, 96.3% for 5 mg/kg Y104D-MMAE; and 100.9% for 15 mg/kg Y104D-MMAE. These results show that despite a similar potency of the DM1 and MMAE warheads, tumor growth inhibition mediated by Y104D-MMAE conjugates is substantially greater than for Y104D-DM1 conjugates (above).

TABLE 39
Y104D-MMAE Effect on Tumor Growth

| | Vehicle | | Y104D-MMAE | | | | | |
|---|---|---|---|---|---|---|---|---|
| Time | — | | 1.5 mg/kg | | 5 mg/kg | | 15 mg/kg | |
| (Days) | AVG | StDev | AVG | StDev | AVG | StDev | AVG | StDev |
| −1 | 364.54 | 66.04 | 356.82 | 59.04 | 358.84 | 65.57 | 357.65 | 69.35 |
| 2 | 626.74 | 147.98 | 520.37 | 165.34 | 568.76 | 143.75 | 586.35 | 145.36 |
| 6 | 977.94 | 163.14 | 704.14 | 292.50 | 543.00 | 120.95 | 484.38 | 98.17 |
| 10 | 1190.49 | 164.37 | 922.94 | 488.02 | 499.82 | 102.25 | 386.04 | 101.80 |
| 14 | 1539.80 | 269.41 | 1106.85 | 635.47 | 438.17 | 81.56 | 374.90 | 93.21 |
| 17 | 1888.41 | 471.35 | 1360.03 | 906.79 | 415.13 | 53.15 | 344.23 | 109.79 |

### 3. HC-Y104D Variant Anti-EGFR Antibody Conjugated to Monomethyl Auristatin F (MMAF) (Y104D-MMAF)

[1107] a. Generation of Y104D-Mc-MMAF (Y104D-MMAF)

[1108] Y104D antibody, generated as described in Example 2, was conjugated to MMAF, substantially as describe in part 2 above, except using MMAF conjugated to the non-cleavable linker, maleimidocaproyl (i.e., MC-MMAF). The final conjugated product had a drug:antibody ratio (DAR) of approximately 4 as assessed by hydrophobic interaction chromatography (HIC-HPLC). Typically, high molecular weight material corresponded to approximately 6.38% of the total prep. In addition, the unconjugated protein corresponded to approximately 4.58% of the intact IgG.

[1109] b. Tumor Growth Inhibition Activity of Y104D-MMAF

[1110] Mice with A431 xenograft tumors were generated as described above in part 2. When the tumors reached a size of ˜350 mm³, the animals were randomized into four study groups: (1) Group 1—vehicle (8.48 mg/mL Sodium Chloride, 1.88 mg/mL Sodium Phosphate Dibasic Heptahydrate, 0.42 mg/mL Sodium Phosphate Monobasic Monohydrate in sterile water) (n=6), (2) Group 2—Y104D-MMAF, administered at 1.5 mg/kg body weight (n=6), (3) Group 3—Y104D-MMAF, administered at 5 mg/kg body weight (n=6), and (4) Group 4—Y104D-MMAF, administered at 15 mg/kg body weight (n=6). Due to the increased starting size of the tumors, all treatments were administered by intravenous injection, biweekly on days 0, 3, 7, 11, and 16. Tumor growth was measured as described above on days −1, 2, 6, 10, 14, and 17.

[1111] The results are set forth in Table 40 below. Mice administered vehicle only exhibited progressive tumor growth over the course of the study. Mice receiving 1.5 mg/kg Y104D-MMAF exhibited a decreased rate in tumor growth compared to the vehicle control. At the higher doses of Y104D-MMAF, there was a substantially reduced tumor growth compared to vehicle control. For example, the tumors of mice that were administered 5 or 15 mg/kg Y104D-MMAF exhibited tumor growth reduction, followed by regression of tumor size back to approximately the baseline volume.

[1112] These results show that despite a reduced potency of the MMAF, compared to MMAE and DM1 warheads, tumor growth inhibition mediated by Y104D-MMAF conjugates is similar to that observed for Y104D-MMAE and substantially greater than for Y104D-DM1 conjugates (see above).

TABLE 40
Y104D-MMAF Effect on Tumor Growth

| | Vehicle | | Y104D-MMAF | | | | | |
|---|---|---|---|---|---|---|---|---|
| Time | — | | 1.5 mg/kg | | 5 mg/kg | | 15 mg/kg | |
| (Days) | AVG | StDev | AVG | StDev | AVG | StDev | AVG | StDev |
| −1 | 364.54 | 66.04 | 355.74 | 52.32 | 360.60 | 63.66 | 361.00 | 66.58 |
| 2 | 626.74 | 147.98 | 516.25 | 60.19 | 474.03 | 157.14 | 461.46 | 156.86 |
| 6 | 977.94 | 163.14 | 843.50 | 109.31 | 586.98 | 105.96 | 435.65 | 167.30 |
| 10 | 1190.49 | 164.37 | 1030.08 | 159.40 | 472.59 | 162.09 | 383.00 | 168.05 |
| 14 | 1539.80 | 269.41 | 1304.81 | 263.41 | 429.65 | 194.89 | 334.94 | 160.15 |
| 17 | 1888.41 | 471.35 | 1592.75 | 396.78 | 364.09 | 233.05 | 370.72 | 179.96 |

### Example 19

### Effect of Y104D-MMAF Antibody-Drug Conjugates (ADCs) on Tumor Growth of KRAS Mutated, EGFR+MDA MB 231 Triple Negative Breast Cancer (TNBC)Tumors In Vivo

[1113] An MDA-MB-231M human breast tumor xenograft model, which is a model of KRAS mutated, EGFR+ tumors, was used to assess tumor growth inhibition activity of Y104D-MMAF antibody drug conjugates (ADCs). Y104D-MMAF ADCs were generated as described in Example 18. The tumor growth inhibition activity of Y104D-MMAF was compared to unconjugated Cetuximab.

[1114] MDA-MB-231-luc-D2H2LN triple negative breast cancer (TNBC) cells (Caliper Life Sciences) were grown under standard conditions to a sub-confluent growth stage of 80% to 90% confluency. The cells were harvested, washed 2× with sterile HBSS, counted, and diluted to 5.0×10⁷ cells/mL with HBSS. 0.1 mL of the cell suspension (5.0×10⁶ cells) were implanted in the mammary fat pad of 4- to 6-week old, female athymic NCr-nu/nu mice. When the tumors reached a size of ˜450 mm³, the animals were randomized into three (3) study groups, as follows: HBSS (vehicle control); 30 mg/kg Cetuximab control; and 30 mg/kg huY104D-MMAF. Mice received an intravenous injection of the treatment article at days 0, 3, 7, 10, 14, and 17. Tumor growth was measured as described above on the days of treatment.

[1115] The results are set forth in Table 41. Mice administered vehicle only exhibited progressive tumor growth over the course of the study. Cetuximab treatment had no effect on tumor growth compared to vehicle-treated control animals, indicating that the antibody was not sufficient to support tumor growth inhibition in this model. In contrast, mice administered Y104D-MMAF exhibited substantially reduced tumor growth over the course of the study compared to the vehicle control, with sustained tumor volume at approximately baseline levels achieved at all tested time points.

TABLE 41
Tumor Growth Following huY104D-MMAF Treatment

| | Dose Groups | | | | | |
|---|---|---|---|---|---|---|
| | | | Cetuximab | | Y104D-MMAF | |
| Time | Vehicle | | (30 mg/kg) | | (30 mg/kg) | |
| (Days) | AVG | StDev | AVG | StDev | AVG | StDev |
| 0 | 431.64 | 113.29 | 473.33 | 82.32 | 447.56 | 113.20 |
| 3 | 620.96 | 101.27 | 655.82 | 139.47 | 522.91 | 165.07 |
| 7 | 880.90 | 191.66 | 1037.62 | 338.26 | 587.10 | 188.62 |
| 10 | 1150.54 | 158.12 | 1180.97 | 273.96 | 546.76 | 226.97 |
| 14 | 1539.59 | 210.55 | 1459.15 | 195.48 | 484.80 | 215.53 |
| 17 | 1824.12 | 317.48 | 1964.10 | 552.83 | 515.00 | 334.31 |

### Example 20

### Effect of Humanized Y104D-MMAE and Y104E-MMAE Antibody-Drug Conjugates (ADCs) on Tumor Growth of KRAS Mutated, EGFR+ Tumors In Vivo

[1116] An HT29 tumor xenograft model and MDA-MB-231M human breast tumor xenograft model, which are both models of KRAS mutated, EGFR+ tumors, were used to assess tumor growth inhibition activity of antibody drug conjugates (ADCs) of variant Y104D or Y104E anti-EGFR antibodies. Humanized Y104D and humanized Y104E antibodies were prepared as described in Example 4.3, and conjugated to MMAE as described in Example 18 to generate the ADCs designated huY104D-MMAE and huY104E-MMAE. The tumor growth inhibition activity of each ADC was compared to chimeric Y104D-MMAE conjugate generated in Example 18.

### 1. HT29 Tumor Xenograft Model

[1117] To generate HT29 tumor xenografts, male, 4- to 6-week old, athymic NCr-nu/nu mice were inoculated with a 0.1 mL subcutaneous (SC) injection of 5.0×10⁶ HT29 colorectal carcinoma cells (ATCC HTB-38) suspended in HBSS into their right flanks. When the tumors reached a size of ˜300 mm³, the animals were randomized into ten (10) study groups as follows: HBSS (vehicle control); 10 mg/kg chimeric Y104D-MMAE; or 3, 6, 10, or 30 mg/kg huY104D-MMAE; or 3, 6, 10, or 30 mg/kg huY104E-MMAE. Mice received an intravenous injection of each test article twice weekly at days 0, 4, 7, 11, 14, 18, 21, and 25. Tumor growth was measured as described above on the days of treatment. Animals were sacrificed when the tumor volume increased to or exceeded about 2000 mm³

[1118] The results are set forth in Table 42 (huY104D-MMAE) and Table 43 (huY104E-MMAE) below. For each Table of results, the Tables also set forth the tumor volume after administration of vehicle control or chimeric Y104D-MMAE at each time point. Mice administered vehicle only exhibited progressive tumor growth over the course of the study. Due to the extent of tumor growth, mice receiving vehicle control were sacrificed after day 14.

TABLE 42
Tumor Growth Following huY104D-MMAE Treatment

| | | Y104D- | | | | |
|---|---|---|---|---|---|---|
| Time | Vehicle | MMAE | huY104D-MMAE | | | |
| (Days) | — | 10 mg/kg | 3 mg/kg | 6 mg/kg | 10 mg/kg | 30 mg/kg |
| −1 | 288.6 ± 90.7 | 286.6 ± 74.2 | 299.7 ± 87.2 | 299.0 ± 97.7 | 294.8 ± 90.9 | 303.1 ± 108.9 |
| 4 | 556.1 ± 204.1 | 374.2 ± 112.0 | 560.8 ± 191.7 | 398.7 ± 108.6 | 562.6 ± 122.2 | 352.1 ± 114.1 |
| 7 | 746.3 ± 352.4 | 362.7 ± 111.7 | 736.3 ± 275.5 | 517.6 ± 207.7 | 599.0 ± 123.7 | 350.2 ± 206.8 |
| 11 | 949.5 ± 336.7 | 271.0 ± 81.1 | 914.5 ± 429.4 | 428.9 ± 202.7 | 434.6 ± 148.2 | 188.3 ± 121.6 |
| 14 | 1297.5 ± 634.5 | 173.3 ± 44.9 | 1058.9 ± 604.2 | 373.1 ± 191.0 | 361.8 ± 164.6 | 146.6 ± 135.5 |
| 18 | | 160.6 ± 48.1 | 1341.7 ± 875.1 | 358.9 ± 223.6 | 338.0 ± 204.1 | 122.4 ± 92.9 |
| 21 | | 168.2 ± 36.0 | | 407.8 ± 232.8 | 346.4 ± 195.2 | 95.2 ± 77.3 |
| 25 | | 168.6 ± 40.6 | | 449.6 ± 263.3 | 372.4 ± 193.9 | 115.3 ± 100.5 |

TABLE 43
Tumor Growth Following huY104E-MMAE Treatment

| | | Y104D- | | | | |
|---|---|---|---|---|---|---|
| Time | Vehicle | MMAE | huY104E-MMAE | | | |
| (Days) | — | 10 mg/kg | 3 mg/kg | 6 mg/kg | 10 mg/kg | 30 mg/kg |
| −1 | 288.6 ± 90.7 | 286.6 ± 74.2 | 300.9 ± 92.1 | 300.8 ± 97.6 | 307.4 ± 91.9 | 292.8 ± 86.3 |
| 4 | 556.1 ± 204.1 | 374.2 ± 112.0 | 590.2 ± 214.3 | 509.2 ± 170.7 | 552.6 ± 264.7 | 472.0 ± 192.2 |
| 7 | 746.3 ± 352.4 | 362.7 ± 111.7 | 893.8 ± 539.5 | 654.5 ± 329.7 | 583.5 ± 288.5 | 542.1 ± 232.9 |
| 11 | 949.5 ± 336.7 | 271.0 ± 81.1 | 1108.7 ± 673.3 | 721.2 ± 399.8 | 481.0 ± 307.0 | 418.0 ± 218.5 |
| 14 | 1297.5 ± 634.5 | 173.3 ± 44.9 | 1234.7 ± 768.0 | 849.1 ± 679.1 | 421.0 ± 301.1 | 324.7 ± 177.4 |
| 18 | | 160.6 ± 48.1 | | | 395.2 ± 255.3 | 286.7 ± 157.7 |
| 21 | | 168.2 ± 36.0 | | | 386.0 ± 277.0 | 249.1 ± 126.1 |
| 25 | | 168.6 ± 40.6 | | | 359.8 ± 244.9 | 209.8 ± 103.6 |

[1119] The results in Tables 42 and 43 show that administration of 10 mg/kg Y104D-MMAE to mice inhibited tumor growth compared to the vehicle control and resulted in tumor regression below the baseline tumor volume by day 11 that was sustained for the duration of the study. The results also show that mice receiving humanized forms of the ADC conjugates, huY104D-MMAE or huY104E-MMAE, also exhibited a strong anti-tumor response with tumor regression.

[1120] For example, as shown in Table 42, mice receiving huY104D-MMAE exhibited dose-dependent tumor growth inhibition, although the extent of tumor inhibition activity was slightly less than for the non-humanized chimeric Y104D-MMAE at the equivalent dose of 10 mg/kg, but was substantially the same or greater at the 30 mg/kg dose. For example, at doses of 6 or 10 mg/kg, mice treated with huY104D-MMAE exhibited reduced tumor growth compared to mice treated with vehicle control, which resulted in tumor regression to approximately baseline tumor volume. At the higher dose of 30 mg/kg, the presence of huY104D-MMAE inhibited tumor growth and resulted in tumor regression to less than baseline levels, resulting in tumor volumes, at day 25, that were less than half the starting (baseline) tumor volume.

[1121] Similar to the results with the huY104D-MMAE, the results in Table 43 show that mice receiving huY104E-MMAE also exhibited dose-dependent tumor inhibition. In this experiment, the extent of anti-tumor response of huY104E-MMAE also was slightly less than for the non-humanized chimeric Y104D-MMAE at all doses tested. For example, mice receiving 10 or 30 mg/kg exhibited reduced tumor growth compared to the vehicle-treated animals, which resulted in tumor regression to about baseline.

### 2. MDA MB 231 Triple Negative Breast Cancer (TNBC)

[1122] A similar study to that described above also was performed in a breast cancer xenograft model generated using the MDA MB 231M xenograft model described in Example 19 above. When the tumors reached a size of ˜400 mm³, the animals were randomized into ten (10) study groups, each containing 6 mice, as follows: HBSS (vehicle control); 10 mg/kg chimeric Y104D-MMAE control; 3, 6, 10, or 30 mg/kg huY104D-MMAE; or 3, 6, 10, or 30 mg/kg huY104E-MMAE. Mice received an intravenous injection of the treatment article at days 0, 3, 6, 9, 13, 16, 20, and 23. Tumor growth was measured as described above on the days of treatment.

[1123] The results are set forth in Table 44 (huY104D-MMAE) and Table 45 (huY104E-MMAE). For each Table of results, the Tables also set forth the tumor volume after administration of vehicle control or chimeric Y104D-MMAE at each time point. Mice administered vehicle only exhibited progressive tumor growth over the course of the study. Due to the extent of tumor growth, mice receiving vehicle control were sacrificed after day 13.

TABLE 44
Breast Tumor Growth Following huY104D-MMAE Treatment

| | | Y104D- | | | | |
|---|---|---|---|---|---|---|
| Time | Vehicle | MMAE | huY104D-MMAE | | | |
| (Days) | — | 10 mg/kg | 3 mg/kg | 6 mg/kg | 10 mg/kg | 30 mg/kg |
| −1 | 397.8 ± 35.9 | 400.7 ± 28.3 | 404.0 ± 31.5 | 403.6 ± 33.4 | 398.3 ± 39.9 | 396.1 ± 42.9 |
| 3 | 565.3 ± 121.0 | 513.9 ± 118.1 | 675.3 ± 159.1 | 614.9 ± 153.7 | 535.4 ± 99.5 | 465.2 ± 127.5 |
| 6 | 783.0 ± 148.7 | 478.4 ± 112.3 | 668.6 ± 137.1 | 602.6 ± 130.8 | 480.6 ± 114.7 | 418.6 ± 95.4 |
| 9 | 1026.9 ± 208.8 | 354.3 ± 84.2 | 725.2 ± 135.2 | 543.5 ± 185.6 | 308.7 ± 52.8 | 255.5 ± 79.6 |
| 13 | 1398.3 ± 442.9 | 223.5 ± 91.7 | 901.4 ± 146.4 | 561.3 ± 221.1 | 122.4 ± 43.5 | 154.2 ± 26.6 |
| 16 | | 202.3 ± 145.3 | 1301.3 ± 456.5 | 617.1 ± 246.8 | 77.3 ± 69.1 | 90.7 ± 56.7 |
| 20 | | 262.7 ± 252.8 | | 811.1 ± 349.8 | 67.3 ± 69.5 | 47.6 ± 44.2 |
| 23 | | 332.9 ± 329.7 | | 958.5 ± 378.5 | 57.5 ± 38.2 | 28.8 ± 22.9 |

TABLE 45
Breast Tumor Growth Following huY104E-MMAE Treatment

| | | Y104D- | | | | |
|---|---|---|---|---|---|---|
| Time | Vehicle | MMAE | huY104E-MMAE | | | |
| (Days) | — | 10 mg/kg | 3 mg/kg | 6 mg/kg | 10 mg/kg | 30 mg/kg |
| −1 | 397.8 ± 35.9 | 400.7 ± 28.3 | 398.4 ± 39.7 | 398.4 ± 37.8 | 403.6 ± 36.2 | 401.0 ± 30.4 |
| 3 | 565.3 ± 121.0 | 513.9 ± 118.1 | 488.7 ± 77.6 | 523.7 ± 150.6 | 516.5 ± 81.6 | 458.2 ± 66.6 |
| 6 | 783.0 ± 148.7 | 478.4 ± 112.3 | 532.6 ± 95.7 | 525.9 ± 73.3 | 461.1 ± 89.9 | 496.5 ± 94.8 |
| 9 | 1026.9 ± 208.8 | 354.3 ± 84.2 | 543.8 ± 129.6 | 571.2 ± 187.6 | 323.5 ± 39.8 | 343.8 ± 57.8 |
| 13 | 1398.3 ± 442.9 | 223.5 ± 91.7 | 771.0 ± 322.7 | 581.2 ± 249.6 | 232.8 ± 133.6 | 172.5 ± 73.7 |
| 16 | | 202.3 ± 145.3 | 871.5 ± 462.2 | 664.8 ± 480.3 | 193.2 ± 176.7 | 116.1 ± 62.0 |
| 20 | | 262.7 ± 252.8 | 1167.1 ± 446.5 | 865.0 ± 577.1 | 173.5 ± 189.2 | 84.3 ± 53.2 |
| 23 | | 332.9 ± 329.7 | 1416.7 ± 465.4 | 1134.6 ± 741.1 | 201.7 ± 233.3 | 50.5 ± 34.2 |

[1124] The results, as shown in Tables 44 and 45, demonstrate that administration of 10 mg/kg Y104D-MMAE to mice inhibited tumor growth compared to the vehicle control and resulted in tumor regression to below the baseline tumor volume by day 9 that was sustained for the duration of the study.

[1125] Similar to the results above in the HT29 xenograft tumor model, the results also show that mice receiving humanized forms of the ADC conjugates, huY104D-MMAE or huY104E-MMAE, also exhibited a strong anti-tumor response with tumor regression. At the lower doses of each of huY104D-MMAE and huY104E-MMAE tested of 3 mg/kg and 6 mg/kg, a reduction in tumor growth compared to vehicle control was observed, but no tumor regression developed. In contrast, like chimeric Y104D-MMAE, both huY104D-MMAE and huY104E-MMAE resulted in tumor regression upon administration of tested doses of 10 mg/kg and 30 mg/kg.

[1126] For example, as shown in Table 44, mice treated with 10 or 30 mg/kg huY104D-MMAE exhibited reduced tumor growth compared to the control and resulted in continued tumor regression beginning at day 6 of the study. At completion of the study, the remaining tumor volume in mice treated with huY104D-MMAE was only about 14% (10 mg/kg) or 7% (30 mg/kg) of the initial tumor volume (see Table 42). Similar results were observed in mice administered 10 mg/kg and 30 mg/kg doses of huY104E-MMAE as shown in Table 45. At completion of the study, the remaining tumor volume in mice treated with huY104E-MMAE was about 50% (10 mg/kg) or 13% (30 mg/kg) of the initial tumor volume (Table 45).

### 3. Conclusion

[1127] These results confirm that the Y104D-MMAE conjugate, and the humanized forms huY104D-MMAE and huY104E-MMAE, exhibit a strong anti-tumor response in KRAS mutated, EGFR+ tumor model. The anti-tumor response of each of the tested antibodies achieves tumor growth regression.

### Example 21

### Assessment of pH-Dependent Growth of Tumor Cells Versus Keratinocytes in the Presence of Cetuximab-MMAE or Y104D-MMAE Antibody-Drug Conjugates (ADCs)

[1128] The pH-dependent effect of anti-EGFR ADC conjugates on growth of EGFR-expressing cells was assessed. Specifically, cell growth of A431 tumor cells at pH 6.8 or cell growth of keratinocyte cells at pH 7.4, each in the presence of Cetuximab-MMAE or Y104D-MMAE, was assessed and compared. Y104D-MMAE was generated as described in Example 18. Cetuximab-MMAE was generated using similar procedures.

### 1. Method

[1129] The day before treatment, A431 cells (ATCC CRL 1555) or a human neonatal keratinocyte cell line (Invitrogen C-001-5C) were plated in wells of a 96 well plate (BD Falcon #35-3072) at about 2,000 cells/well in 100 μL complete media that had been adjusted to appropriate pH. Keratinocytes were tested in EpiLife supplemented with EpiLife Defined Growth Supplement (Life Technologies) at pH 7.4 and A431 cells were tested in RPMI 1640+10% FBS buffered with MES (pH6.8). The pH of MES-buffered RPMI 1640+10% FBS was initially set at pH 7.4 and media reached pH 6.8 after 2 hours in the CO₂ incubator. Hence, cell growth of A431 cells was assessed at pH 6.8 and cell growth of keratinocyte cells was assessed at pH 7.4. The cells were untreated or treated with 1:3 serial dilutions of each of the ADCs that were added to achieve concentrations between 0.9 μg/mL and 0.00001 μg/mL for A431 cells. Each of the ADCs were tested at concentrations between 90 μg/mL and 0.001 μg/mL in Keratinocytes. Each condition was assayed in 3 replicate wells (i.e., n=3 per condition). Cells were incubated for 5 days at 37° C. in a humidified atmosphere of 5% CO₂ incubator. Cell growth was measured by CellTiter-Glo® Luminescent Cell Viability Assay (Promega Cat# G-7571) according to the manufacturer's instructions. The percent cell growth inhibition (CGI) was determined as the percentage of the decrease in surviving cells relative to untreated cells. The IC50 value was defined as the drug concentration needed to inhibit 50% of the cell growth compared to growth of the untreated control cells.

### 2. Results

[1130] The results showed that Cetuximab-MMAE and Y104D-MMAE exhibited inhibition of cell growth of A431 cells, which was virtually identical between the tested agents. When plotted with the concentration on the x-axis (LOG (mg/mL) and % cell growth inhibition on the y-axis, treatment with Cetuximab-MMAE and Y104D-MMAE exhibited overlapping, sigmoidal, concentration-dependent cell growth inhibition. Approximately 50% CGI was observed for both ADCs at approximately 0.001 μg/mL, and up to approximately 80% CGI was observed for both ADCs at the higher concentrations tested.

[1131] In contrast, Y104D-MMAE exhibited less keratinocyte growth inhibition compared to Cetuximab-MMAE. When plotted with the concentration on the x-axis (LOG (μg/mL) and % cell growth inhibition on the y-axis, treatment with Cetuximab-MMAE and Y104D-MMAE exhibited sigmoidal, concentration dependent cell growth inhibition, but the curve for the Y104D-MMAE treatment was shifted to indicate significantly reduced growth inhibition. For example, Cetuximab-MMAE exhibited approximately 50% CGI at a concentration of approximately 0.1 μg/mL, whereas to achieve 50% CGI, 1 μg/mL Y104D-MMAE was required. At the maximum doses, Cetuximab achieved about 80% CGI and Y104D-MMAE exhibited a CGI of about 70%.

[1132] Therefore, these results confirm that the MMAE ADC conjugate of Y104D anti-EGFR retains the pH-dependent activity of Y104D anti-EGFR, such that the Y104D-MMAE exhibits less cell growth inhibition activity of skin keratinocytes than the A431 tumor cells.

### Example 22

### Assessment of pH-Dependent Growth of Tumor Cells Versus Keratinocytes in the Presence of Chimeric Y104D-MMAE or Humanized Y104 Variant Antibody-Drug Conjugates (ADCs)

[1133] To confirm the activity of ADC conjugates of humanized anti-EGFR variants huY104D-MMAE and huY104E-MMAE, the pH-dependent effect of each on growth of EGFR-expressing cells was assessed and compared to chimeric Y104D-MMAE using procedures substantially the same as described in Example 20. Specifically, cell growth of HT29 tumor cells (ATCC HTB-38) at pH 6.8, MDA-MB-231 tumor cells (ATCC HTB-26) at pH 6.8 or keratinocyte cells at pH 7.4 was assessed, each in the presence of Y104D-MMAE, huY104D-MMAE or huY104E-MMAE. Each of the tested conjugates was generated using procedures as described in Example 18. In addition, for studies assessing cell growth of keratinocytes, the non Adcetris (brentuximab vedotin, an non-target antibody conjugated MMAE; obtained from a Commercial Pharmacy) also was tested for cell growth inhibition as a negative control.

[1134] 1. Method

[1135] The cell growth assays were performed using substantially the same procedures described in Example 21, except the ADCs were serially diluted 1:3 to achieve concentrations between 200 and 0.03 nM. HT29 cells and MDA-MB-231 cells were cultured and assayed in the presence of MES-buffered RPMI+10% FBS (pH 6.8), while keratinocytes were cultured and assayed in Epilife (pH 7.4)

[1136] 2. Results

[1137] Treatment with each of chimeric Y104D-MMAE, huY104D-MMAE or huY104E-MMAE resulted in similar levels of dose-dependent cell growth inhibition of both HT29 and MDA-MB-231 cells. For HT29 cells, the ADC treatment resulted in about 50% cell growth inhibition at a concentration of approximately 22 nM and about 80% cell growth inhibition at the maximum concentration tested. For MDA-MB-231 cells, the ADC treatment resulted in up to about 35-40% cell growth inhibition at the maximum dose tested.

[1138] Chimeric Y104D-MMAE exhibited cell growth inhibition of keratinocytes, with 50% growth inhibition achieved with 3.7 nM chimeric Y104D-MMAE. In contrast, each of the humanized variant ADCs, huY104D-MMAE and huY104E-MMAE, exhibited reduced keratinocyte growth inhibition compared to chimeric Y104D-MMAE. For example, the IC50 for cell growth inhibition of huY104D-MMAE was about 17 nM and the IC50 for cell growth inhibition of huY104E-MMAE was about 5.4 nM. In comparison, the IC50 for cell growth inhibition of the non-target antibody control, Adcetris was 50 nM.

[1139] Therefore, these results show that ADC conjugates of the humanized forms of the Y104D- and Y104E-anti-EGFR variants exhibit greater pH-dependent activity than the chimeric Y104D-MMAE conjugate. For example, while each are as effective as the chimeric Y104D-MMAE for inhibiting tumor cell growth at pH 6.8, each exhibit reduced growth inhibition of non-tumor keratinocytes at pH 7.4 compared to the chimeric Y104D-MMAE.

### Example 23

### Stability of Y104E Antibody Drug Conjugate (ADC) Formulations

[1140] HuY104E-MMAE ADCs, generated as described in Example 20, were formulated in compositions with different stabilizing agents as set forth in Table 46. Each antibody formulation, at a protein concentration of 3.75 mg/ml, was placed into 1.5 mL Eppendorf tube and subjected to 2 rounds of freeze-thaw cycles, where the tubes were frozen in dry ice/ethanol for 30 min. and then allowed to thaw at room temperature in a rack for 10 min. The samples were analyzed for protein content by measuring absorbance at 280 nm, turbidity (aggregation) by measuring absorbance at 340 nm, and opalescence (aggregation) by measuring transmittance (T %) at 580 nm, following formulation and after each freeze-thaw cycle, to access formulation stability.

[1141] The results, presented as a percent increase after the respective thaw cycle compared to the initial value, are provided in Table 46 below. The results indicate that all tested stabilizing agents result in more stable formulations than PBS alone. In particular, the results indicate PBS formulations that include 0.02% Tween 80 or 280 mM trehalose stabilizing agents are more stable than formulations with the other stabilizing agents.

TABLE 46
Y104E ADC Formulations

| | OD | | | | | |
|---|---|---|---|---|---|---|
| | 280 nm: protein | | 340 nm: turbidity | | 580 nm: Opalescence | |
| | freezing/thawing | | | | | |
| | Thaw 1 | Thaw 2 | Thaw 1 | Thaw 2 | Thaw 1 | Thaw 2 |
| | (% increase) | (% increase) | (% increase) | (% increase) | (% increase) | (% increase) |
| PBS | 1 | 2.1 | 131.3 | 462.5 | 550 | 1750 |
| PBS/3.6% glycerol | 0.7 | 0.3 | 42.9 | 42.9 | 300 | 500 |
| PBS/280 mM | 0 | 0.3 | 0 | 52.9 | −33 | 133 |
| trehalose | | | | | | |
| PBS/280 mM sucrose | 0.3 | 0.3 | 5.6 | 27.8 | 50 | 100 |
| PBS/280 mM sorbitol | 0.3 | 0.3 | 76.5 | 82.4 | 250 | 300 |
| PBS/0.02% Tween 80 | −0.7 | 0 | −33.3 | −5.6 | −50 | −50 |

[1142] Since modifications will be apparent to those of skill in the art, it is intended that this invention be limited only by the scope of the appended claims.

1. A modified anti-EGFR antibody or antigen-binding fragment thereof, comprising an amino acid replacement(s) in a variable heavy chain (VH) of an unmodified anti-EGFR antibody or antigen-binding fragment thereof corresponding to replacement with glutamic acid (E) at a position corresponding to position 104 with reference to amino acid positions set forth in SEQ ID NO: 2 or 7, wherein:
amino acid positions are identified by alignment of the variable heavy chain of the antibody with the variable heavy chain set forth in SEQ ID NO: 2 or 7;
the unmodified anti-EGFR antibody or antigen-binding fragment thereof is selected from among:
i) cetuximab or an antigen-binding fragment thereof comprising a variable heavy chain set forth in SEQ ID NO: 2 or 7 and a variable light chain set forth in SEQ ID NOS: 4, 9 or 11;
ii) an antibody or antigen-binding fragment thereof that exhibits at least 85% sequence identity to the antibody or antigen-binding fragment thereof of i); and
iii) a humanized form of i) or ii); and
the modified anti-EGFR antibody specifically binds epidermal growth factor receptor (EGFR) or a soluble fragment thereof.

2. The modified anti-EGFR antibody, or antigen-binding fragment thereof, of claim 1, comprising:
a) a variable heavy (VH) chain comprising the sequence of amino acids set forth in SEQ ID NO: 74 or 75, or a sequence of amino acids that exhibits at least 85%, 90% or 95% sequence identity to SEQ ID NO: 74 or 75; and
b) a variable light (VL) chain comprising the sequence of amino acids set forth in SEQ ID NO:4, 9 or 11, or a sequence of amino acids that exhibits at least 85%, 90% or 95% sequence identity to SEQ ID NO:4, 9 or 11.

3. The modified anti-EGFR antibody, or antigen-binding fragment thereof, of claim 1, wherein the modified antibody or antigen-binding fragment thereof is humanized and comprises the amino acid replacement with glutamic acid (E) at a position corresponding to position 104.

4. The anti-EGFR antibody, or antigen-binding fragment thereof, of claim 3, comprising:
a) a variable heavy chain comprising the sequence of amino acids set forth in SEQ ID NO: 61 or 63 or a sequence of amino acids that exhibits at least 85%, 90% or 95% sequence identity to SEQ ID NO: 61 or 63; and
b) a variable light chain comprising the sequence of amino acids set forth in SEQ ID NO: 183, 184 or 186 or a sequence of amino acids that exhibits at least 85%, 90% or 95% sequence identity to SEQ ID NO: 183, 184 or 186.

5. The modified anti-EGFR antibody, or antigen-binding fragment thereof, of claim 2, that comprises up to 1, 2, 3, 4, 5, 6, 7, 8, 9 or 10 amino acid replacements in the variable heavy chain set forth in SEQ ID NO: 74 or 75 and/or in the variable light chain set forth in SEQ ID NO: 4, 9 or 11, other than the replacement with E at a position corresponding to position 104 in the heavy chain.

6. The modified anti-EGFR antibody, or antigen-binding fragment thereof, of claim 4, that comprises up to 1, 2, 3, 4, 5, 6, 7, 8, 9 or 10 amino acid replacements in the variable heavy chain set forth in SEQ ID NO: 61 or 63 and/or in the variable light chain set forth in SEQ ID NO: 183, 184 or 186, other than the replacement with E at a position corresponding to position 104 in the heavy chain.

7. The modified anti-EGFR antibody, or antigen-binding fragment thereof, of claim 1, comprising one or more amino acid replacement(s) selected from among:
amino acid replacement(s) in a variable heavy chain of the unmodified antibody corresponding to amino acid replacement(s) selected from among V24I, V24L, V24E, S25C, S25G, S25I, S25M, S25V, S25Q, S25T, S25L, S25H, S25R, S25A, S25D, F27R, S28C, L29H, T30F, N31H, N31I, N31T, N31V, Y32T, V50L, S53G, G54D, G54S, G54R, G54C, G54P, D58M, Y59E, F63R, F63C, F63G, F63M, F63V, F63P, F63S, T64N, T64V, L67G, S68F, S68Q, D72K, D72L, D72P, D72M, D72W, N73Q, S74H, S74R, S74D, S74G, S74Y, K75H, K75G, K75W, K75P, S76I, S76V, Q77R, Q77E, R97H, T100I, T100P, Y101W, Y105V, A107N, Q111I, Q111P and Q111V with reference to SEQ ID NO:2 or 7, wherein corresponding amino acid positions are identified by alignment of the variable heavy chain of the antibody with the variable heavy chain set forth in SEQ ID NO: 2 or 7; and
amino acid replacement(s) in a variable light chain of the unmodified antibody corresponding to amino acid replacement(s) selected from among L4C, L4F, L4V, T5P, R24G, I29S, S56H and N91V with reference to SEQ ID NO:4, wherein corresponding amino acid positions are identified by alignment of the variable light chain of the antibody with the variable light chain set forth in SEQ ID NO: 4.

8. The modified anti-EGFR antibody, or antigen-binding fragment thereof, of claim 7, wherein the amino acid replacements are selected from among HC-Y104E/HC-Q111P; HC-S25C/HC-Y104E; HC-Y104E/HC-Q111P/LC-I29S; HC-S53G/HC-Y104E; HC-S53G/HC-Y104E/HC-Q111P; HC-S25V/HC-Y104E; HC-S25V/HC-Y104E/HC-Q111P; HC-S25V/HC-S53G/HC-Y104E; HC-S25V/HC-S53G/HC-Y104E/HC-Q111P; HC-T30F/HC-Y104E; HC-T30F/HC-Y104E/HC-Q111P; HC-T30F/HC-S53G/HC-Y104E; HC-T30F/HC-S53G/HC-Y104E/HC-Q111P; HC-D72L/HC-Y104E; HC-D72L/HC-Y104E/HC-Q111P; HC-S53G/HC-D72L/HC-Y104E; HC-S53G/HC-D72L/HC-Y104E/HC-Q111P; HC-Y104E/LC-I29S and HC-Y104E/HC-Q111P/LC-I29S.

9. The modified anti-EGFR antibody, or antigen-binding fragment thereof, of claim 7, comprising:
a) a variable heavy (VH) chain comprising the sequence of amino acids set forth in SEQ ID NOS: 77, 78, 80, 81, 83, 84, 86, 87, 89, 90, 92, 93, 95, 96, 98, 99, 101, 102, 104, 105, 107, 108, 110, 111, 113, 114, 116, 117, 119, 120, 122, or 123, or a sequence of amino acids that exhibits at least 85%, 90%, or 95% sequence identity to any of SEQ ID NOS: 77, 78, 80, 81, 83, 84, 86, 87, 89, 90, 92, 93, 95, 96, 98, 99, 101, 102, 104, 105, 107, 108, 110, 111, 113, 114, 116, 117, 119, 120, 122, or 123; and
b) a variable light (VL) chain comprising the sequence of amino acids set forth in SEQ ID NO:4, 9 or 11, or a sequence of amino acids that exhibits at least 85%, 90%, or 95% sequence identity to SEQ ID NO:4, 9 or 11.

10. The modified anti-EGFR antibody, or antigen-binding fragment thereof, of claim 7, comprising:
a) a variable heavy (VH) chain comprising the sequence of amino acids set forth in SEQ ID NO: 74, 75, 77, 78, 80, 81, 83, 84, 86, 87, 89, 90, 92, 93, 95, 96, 98, 99, 101, 102, 104, 105, 107, 108, 110, 111, 113, 114, 116, 117, 119, 120, 122, or 123, or a sequence of amino acids that exhibits at least 85%, 90% or 95% sequence identity to any of SEQ ID NOS: 74, 75, 77, 78, 80, 81, 83, 84, 86, 87, 89, 90, 92, 93, 95, 96, 98, 99, 101, 102, 104, 105, 107, 108, 110, 111, 113, 114, 116, 117, 119, 120, 122, or 123; and
b) a variable light (VL) chain comprising the sequence of amino acids set forth in SEQ ID NO: 125, 126 or 127, or a sequence of amino acids that exhibits at least 85%, 90% or 95% sequence identity to any of SEQ ID NOS: 125, 126 or 127.

11. The modified anti-EGFR antibody, or antigen-binding fragment thereof, of claim 3, comprising one or more amino acid replacement(s) selected from among:
amino acid replacement(s) in a variable heavy chain of the unmodified antibody corresponding to amino acid replacement(s) selected from among V24I, V24L, V24E, S25C, S25G, S25I, S25M, S25V, S25Q, S25T, S25L, S25H, S25R, S25A, S25D, F27R, S28C, L29H, T30F, N31H, N31I, N31T, N31V, Y32T, V50L, S53G, G54D, G54S, G54R, G54C, G54P, D58M, Y59E, F63R, F63C, F63G, F63M, F63V, F63P, F63S, T64N, T64V, L67G, S68F, S68Q, D72K, D72L, D72P, D72M, D72W, N73Q, S74H, S74R, S74D, S74G, S74Y, K75H, K75G, K75W, K75P, S76I, S76V, Q77R, Q77E, R97H, T100I, T100P, Y101W, Y105V, A107N, Q111I, Q111P and Q111V with reference to SEQ ID NO:2 or 7, wherein corresponding amino acid positions are identified by alignment of the variable heavy chain of the antibody with the variable heavy chain set forth in SEQ ID NO: 2 or 7; and
amino acid replacement(s) in a variable light chain of the unmodified antibody corresponding to amino acid replacement(s) selected from among L4C, L4F, L4V, T5P, R24G, I29S, S56H and N91V with reference to SEQ ID NO:4, wherein corresponding amino acid positions are identified by alignment of the variable light chain of the antibody with the variable light chain set forth in SEQ ID NO: 4.

12. The modified anti-EGFR antibody, or antigen-binding fragment thereof, of claim 11, wherein the amino acid replacements are selected from among HC-Y104E/HC-Q111P; HC-S25C/HC-Y104E; HC-Y104E/HC-Q111P/LC-I29S; HC-S53G/HC-Y104E; HC-S53G/HC-Y104E/HC-Q111P; HC-S25V/HC-Y104E; HC-S25V/HC-Y104E/HC-Q111P; HC-S25V/HC-S53G/HC-Y104E; HC-S25V/HC-S53G/HC-Y104E/HC-Q111P; HC-T30F/HC-Y104E; HC-T30F/HC-Y104E/HC-Q111P; HC-T30F/HC-S53G/HC-Y104E; HC-T30F/HC-S53G/HC-Y104E/HC-Q111P; HC-D72L/HC-Y104E; HC-D72L/HC-Y104E/HC-Q111P; HC-S53G/HC-D72L/HC-Y104E; HC-S53G/HC-D72L/HC-Y104E/HC-Q111P; HC-Y104E/LC-I29S and HC-Y104E/HC-Q111P/LC-I29S.

13. The anti-EGFR antibody, or antigen-binding fragment thereof, of claim 11, comprising a sequence of amino acids selected from among:
a) the variable heavy chain set forth in SEQ ID NO: 131 or 133 or a sequence of amino acids that exhibits at least 85% sequence identity to SEQ ID NO: 131 or 133, and the variable light chain set forth in SEQ ID NO: 155, 156 or 158 or a sequence of amino acids that exhibits at least 85% sequence identity to SEQ ID NO: 155, 156 or 158;
b) the variable heavy chain set forth in SEQ ID NO: 131 or 133 or a sequence of amino acids that exhibits at least 85% sequence identity to SEQ ID NO: 131 or 133, and the variable light chain set forth in SEQ ID NO: 162, 163 or 165 or a sequence of amino acids that exhibits at least 85% sequence identity to SEQ ID NO: 162, 163 or 165;
c) the variable heavy chain set forth in SEQ ID NO: 137 or 139 or a sequence of amino acids that exhibits at least 85% sequence identity to SEQ ID NO: 137 or 139, and the variable light chain set forth in SEQ ID NO: 155, 156 or 158 or a sequence of amino acids that exhibits at least 85% sequence identity to SEQ ID NO: 155, 156 or 158;
d) the variable heavy chain set forth in SEQ ID NO: 131 or 133 or a sequence of amino acids that exhibits at least 85% sequence identity to SEQ ID NO: 131 or 133, and the variable light chain set forth in SEQ ID NO: 169, 170 or 172 or a sequence of amino acids that exhibits at least 85% sequence identity to SEQ ID NO: 169, 170 or 172;
e) the variable heavy chain set forth in SEQ ID NO: 131 or 133 or a sequence of amino acids that exhibits at least 85% sequence identity to SEQ ID NO: 131 or 133, and the variable light chain set forth in SEQ ID NO: 176, 177 or 179 or a sequence of amino acids that exhibits at least 85% sequence identity to SEQ ID NO: 176, 177 or 179;
f) the variable heavy chain set forth in SEQ ID NO: 131 or 133 or a sequence of amino acids that exhibits at least 85% sequence identity to SEQ ID NO: 131 or 133 and the variable light chain set forth in SEQ ID NO: 183, 184 or 186 or a sequence of amino acids that exhibits at least 85% sequence identity to SEQ ID NO: 183, 184 or 186;
g) the variable heavy chain set forth in SEQ ID NO: 137 or 139 or a sequence of amino acids that exhibits at least 85% sequence identity to SEQ ID NO: 137 or 139, and the variable light chain set forth in SEQ ID NO: 183, 184 or 186 or a sequence of amino acids that exhibits at least 85% sequence identity to SEQ ID NO: 183, 184 or 186;
h) the variable heavy chain set forth in SEQ ID NO: 131 or 133 or a sequence of amino acids that exhibits at least 85% sequence identity to SEQ ID NO: 131 or 133, and the variable light chain set forth in SEQ ID NO: 190, 191 or 193 or a sequence of amino acids that exhibits at least 85% sequence identity to SEQ ID NO: 190, 191 or 193;
i) the variable heavy chain set forth in SEQ ID NO: 143 or 145 or a sequence of amino acids that exhibits at least 85% sequence identity to SEQ ID NO: 143 or 145, and the variable light chain set forth in SEQ ID NO: 183, 184 or 186 or a sequence of amino acids that exhibits at least 85% sequence identity to SEQ ID NO: 183, 184 or 186;
j) the variable heavy chain set forth in SEQ ID NO: 149 or 151 or a sequence of amino acids that exhibits at least 85% sequence identity to SEQ ID NO: 149 or 151, and the variable light chain set forth in SEQ ID NO: 197, 198 or 200 or a sequence of amino acids that exhibits at least 85% sequence identity to SEQ ID NO: 197, 198 or 200;
k) the variable heavy chain set forth in SEQ ID NO: 143 or 145 or a sequence of amino acids that exhibits at least 85% sequence identity to SEQ ID NO: 143 or 145, and the variable light chain set forth in SEQ ID NO: 197, 198 or 200 or a sequence of amino acids that exhibits at least 85% sequence identity to SEQ ID NO: 197, 198 or 200;
l) the variable heavy chain set forth in SEQ ID NO: 149 or 151 or a sequence of amino acids that exhibits at least 85% sequence identity to SEQ ID NO: 149 or 151, and the variable light chain set forth in SEQ ID NO: 204, 205 or 207 or a sequence of amino acids that exhibits at least 85% sequence identity to SEQ ID NO: 204, 205 or 207;
m) the variable heavy chain set forth in SEQ ID NO: 143 or 145 or a sequence of amino acids that exhibits at least 85% sequence identity to SEQ ID NO: 143 or 145, and the variable light chain set forth in SEQ ID NO: 204, 205 or 207 or a sequence of amino acids that exhibits at least 85% sequence identity to SEQ ID NO: 204, 205 or 207;
n) the variable heavy chain set forth in SEQ ID NO: 211 or 213 or a sequence of amino acids that exhibits at least 85% sequence identity to SEQ ID NO: 211 or 213, and the variable light chain set forth in SEQ ID NO: 253, 254 or 256 or a sequence of amino acids that exhibits at least 85% sequence identity to SEQ ID NO: 253, 254 or 256;
o) the variable heavy chain set forth in SEQ ID NO: 217 or 219 or a sequence of amino acids that exhibits at least 85% sequence identity to SEQ ID NO: 217 or 219, and the variable light chain set forth in SEQ ID NO: 253, 254 or 256 or a sequence of amino acids that exhibits at least 85% sequence identity to SEQ ID NO: 253, 254 or 256;
p) the variable heavy chain set forth in SEQ ID NO: 223 or 225 or a sequence of amino acids that exhibits at least 85% sequence identity to SEQ ID NO: 223 or 225, and the variable light chain set forth in SEQ ID NO: 260, 261 or 263 or a sequence of amino acids that exhibits at least 85% sequence identity to SEQ ID NO: 260, 261 or 263;
q) the variable heavy chain set forth in SEQ ID NO: 229 or 231 or a sequence of amino acids that exhibits at least 85% sequence identity to SEQ ID NO: 229 or 231, and the variable light chain set forth in SEQ ID NO: 260, 261 or 263 or a sequence of amino acids that exhibits at least 85% sequence identity to SEQ ID NO: 260, 261 or 263;
r) the variable heavy chain set forth in SEQ ID NO: 235 or 237 or a sequence of amino acids that exhibits at least 85% sequence identity to SEQ ID NO: 235 or 237, and the variable light chain set forth in SEQ ID NO: 267, 268 or 270 or a sequence of amino acids that exhibits at least 85% sequence identity to SEQ ID NO: 267, 268 or 270;
s) the variable heavy chain set forth in SEQ ID NO: 241 or 243 or a sequence of amino acids that exhibits at least 85% sequence identity to SEQ ID NO: 241 or 243, and the variable light chain set forth in SEQ ID NO: 274, 275 or 277 or a sequence of amino acids that exhibits at least 85% sequence identity to SEQ ID NO: 274, 275 or 277;
t) the variable heavy chain set forth in SEQ ID NO: 223 or 225 or a sequence of amino acids that exhibits at least 85% sequence identity to SEQ ID NO: 223 or 225, and the variable light chain set forth in SEQ ID NO: 274, 275 or 277 or a sequence of amino acids that exhibits at least 85% sequence identity to SEQ ID NO: 274, 275 or 277;
u) the variable heavy chain set forth in SEQ ID NO: 229 or 231 or a sequence of amino acids that exhibits at least 85% sequence identity to SEQ ID NO: 229 or 231, and the variable light chain set forth in SEQ ID NO: 274, 275 or 277 or a sequence of amino acids that exhibits at least 85% sequence identity to SEQ ID NO: 274, 275 or 277;
v) the variable heavy chain set forth in SEQ ID NO: 235 or 237 or a sequence of amino acids that exhibits at least 85% sequence identity to SEQ ID NO: 235 or 237, and the variable light chain set forth in SEQ ID NO: 281, 282 or 284 or a sequence of amino acids that exhibits at least 85% sequence identity to SEQ ID NO: 281, 282 or 284;
w) the variable heavy chain set forth in SEQ ID NO: 247 or 249 or a sequence of amino acids that exhibits at least 85% sequence identity to SEQ ID NO: 247 or 249, and the variable light chain set forth in SEQ ID NO: 281, 282 or 284 or a sequence of amino acids that exhibits at least 85% sequence identity to SEQ ID NO: 281, 282 or 284;
x) the variable heavy chain set forth in SEQ ID NO: 223 or 225 or a sequence of amino acids that exhibits at least 85% sequence identity to SEQ ID NO: 223 or 225, and the variable light chain set forth in SEQ ID NO: 281, 282 or 284 or a sequence of amino acids that exhibits at least 85% sequence identity to SEQ ID NO: 281, 282 or 284;
y) the variable heavy chain set forth in SEQ ID NO: 229 or 231 or a sequence of amino acids that exhibits at least 85% sequence identity to SEQ ID NO: 229 or 231, and the variable light chain set forth in SEQ ID NO: 281, 282 or 284 or a sequence of amino acids that exhibits at least 85% sequence identity to SEQ ID NO: 281, 282 or 284;
z) the variable heavy chain set forth in SEQ ID NO: 235 or 237 or a sequence of amino acids that exhibits at least 85% sequence identity to SEQ ID NO: 235 or 237, and the variable light chain set forth in SEQ ID NO: 288, 289 or 291 or a sequence of amino acids that exhibits at least 85% sequence identity to SEQ ID NO: 288, 289 or 291;
aa) the variable heavy chain set forth in SEQ ID NO: 247 or 249 or a sequence of amino acids that exhibits at least 85% sequence identity to SEQ ID NO: 247 or 249, and the variable light chain set forth in SEQ ID NO: 288, 289 or 291 or a sequence of amino acids that exhibits at least 85% sequence identity to SEQ ID NO: 288, 289 or 291;
bb) the variable heavy chain set forth in SEQ ID NO: 223 or 225 or a sequence of amino acids that exhibits at least 85% sequence identity to SEQ ID NO: 223 or 225, and the variable light chain set forth in SEQ ID NO: 288, 289 or 291 or a sequence of amino acids that exhibits at least 85% sequence identity to SEQ ID NO: 288, 289 or 291;
cc) the variable heavy chain set forth in SEQ ID NO: 229 or 231 or a sequence of amino acids that exhibits at least 85% sequence identity to SEQ ID NO: 229 or 231, and the variable light chain set forth in SEQ ID NO: 288, 289 or 291 or a sequence of amino acids that exhibits at least 85% sequence identity to SEQ ID NO: 288, 289 or 291;
dd) the variable heavy chain set forth in SEQ ID NO: 235 or 237 or a sequence of amino acids that exhibits at least 85% sequence identity to SEQ ID NO: 235 or 237, and the variable light chain set forth in SEQ ID NO: 295, 296 or 298 or a sequence of amino acids that exhibits at least 85% sequence identity to SEQ ID NO: 295, 296 or 298;
ee) the variable heavy chain set forth in SEQ ID NO: 247 or 249 or a sequence of amino acids that exhibits at least 85% sequence identity to SEQ ID NO: 247 or 249, and the variable light chain set forth in SEQ ID NO: 302, 303 or 305 or a sequence of amino acids that exhibits at least 85% sequence identity to SEQ ID NO: 302, 303 or 305;
ff) the variable heavy chain set forth in SEQ ID NO: 211 or 213 or a sequence of amino acids that exhibits at least 85% sequence identity to SEQ ID NO: 211 or 213, and the variable light chain set forth in SEQ ID NO: 302, 303 or 305 or a sequence of amino acids that exhibits at least 85% sequence identity to SEQ ID NO: 302, 303 or 305;
gg) the variable heavy chain set forth in SEQ ID NO: 211 or 213 or a sequence of amino acids that exhibits at least 85% sequence identity to SEQ ID NO: 211 or 213, and the variable light chain set forth in SEQ ID NO: 281, 282 or 284 or a sequence of amino acids that exhibits at least 85% sequence identity to SEQ ID NO: 281, 282 or 284;
hh) the variable heavy chain set forth in SEQ ID NO: 211 or 213 or a sequence of amino acids that exhibits at least 85% sequence identity to SEQ ID NO: 211 or 213, and the variable light chain set forth in SEQ ID NO: 288, 289 or 291 or a sequence of amino acids that exhibits at least 85% sequence identity to SEQ ID NO: 288, 289 or 291.

14. The modified anti-EGFR antibody, or antigen-binding fragment thereof, of claim 1 that is an antigen-binding fragment selected from among Fab, Fab′, F(ab′)₂, single-chain Fv (scFv), Fv, dsFv, diabody, Fd and Fd′ fragments.

15. The modified anti-EGFR antibody, or antigen-binding fragment thereof, of claim 1 that is a full-length antibody.

16. The modified anti-EGFR antibody, or antigen-binding fragment thereof, of claim 15, wherein the modified anti-EGFR antibody comprises:
a) the heavy chain comprising the sequence of amino acids set forth in SEQ ID NO:
72, 76, 79, 82, 85, 88, 91, 94, 97, 100, 103, 106, 109, 112, 115, 118, or 121 or a variant thereof that exhibits at least 85%, 90%, or 95% sequence identity to SEQ ID NO: 72, 76, 79, 82, 85, 88, 91, 94, 97, 100, 103, 106, 109, 112, 115, 118, or 121; and
b) a light chain comprising the sequence of amino acids set forth in any of SEQ ID NOS: 3, 8, 10 or 13, or a variant thereof that exhibits at least 85%, 90% or 95% sequence identity thereto.

17. The anti-EGFR antibody, or antigen-binding fragment thereof, of claim 15, wherein the modified antibody comprises:
a heavy chain comprising the sequence of amino acids set forth in any of SEQ ID NOS: 72, 76, 79, 82, 85, 88, 91, 94, 97, 100, 103, 106, 109, 112, 115, 118, or 121, or a variant thereof that exhibits at least 85%, 90% or 95% sequence identity to any of SEQ ID NOS: 72, 76, 79, 82, 85, 88, 91, 94, 97, 100, 103, 106, 109, 112, 115, 118, or 121; and
a light chain comprising the sequence of amino acids set forth in SEQ ID NO: 124, or a variant thereof that exhibits at least 85%, 90% or 95% sequence identity to SEQ ID NO: 124.

18. The modified anti-EGFR antibody, or antigen-binding fragment thereof, of claim 3 that is an antigen-binding fragment selected from among Fab, Fab′, F(ab′)₂, single-chain Fv (scFv), Fv, dsFv, diabody, Fd and Fd′ fragments.

19. The modified anti-EGFR antibody, or antigen-binding fragment thereof, of claim 3 that is a full-length antibody.

20. The modified anti-EGFR antibody, or antigen-binding fragment thereof, of claim 19, wherein the antibody comprises:
a) a heavy chain comprising the sequence of amino acids set forth in SEQ ID NO: 59 or a sequence of amino acids that exhibits at least 85%, 90% or 95% sequence identity to SEQ ID NO: 59; and
b) the light chain comprising the sequence of amino acids set forth in SEQ ID NO: 181 or a sequence of amino acids that exhibits at least 85%, 90% or 95% sequence identity to SEQ ID NO: 181.

21. The modified anti-EGFR antibody, or antigen-binding fragment thereof, of claim 20, that comprises up to 1, 2, 3, 4, 5, 6, 7, 8, 9, or 10 amino acid replacements in the heavy chain set forth in SEQ ID NO: 59 and/or in the light chain set forth ins SEQ ID NO: 181, other than the replacement with E at a position corresponding to position 104 in the heavy chain.

22. The anti-EGFR antibody, or antigen-binding fragment thereof, of claim 19, wherein the antibody comprises a sequence of amino acids selected from among:
a) the heavy chain set forth in SEQ ID NO: 129 or a sequence of amino acids that exhibits at least 85%, 90% or 95% sequence identity to SEQ ID NO: 129, and the light chain set forth in SEQ ID NO: 153 or a sequence of amino acids that exhibits at least 85%, 90% or 95% sequence identity to SEQ ID NO: 153;
b) the heavy chain set forth in SEQ ID NO: 129 or a sequence of amino acids that exhibits at least 85%, 90% or 95% sequence identity to SEQ ID NO: 129, and the light chain set forth in SEQ ID NO: 160 or a sequence of amino acids that exhibits at least 85%, 90% or 95% sequence identity to SEQ ID NO: 160;
c) the heavy chain set forth in SEQ ID NO: 135 or a sequence of amino acids that exhibits at least 85%, 90% or 95% sequence identity to SEQ ID NO: 135, and the light chain set forth in SEQ ID NO: 153 or a sequence of amino acids that exhibits at least 85%, 90% or 95% sequence identity to SEQ ID NO: 153;
d) the heavy chain set forth in SEQ ID NO: 129 or a sequence of amino acids that exhibits at least 85%, 90% or 95% sequence identity to SEQ ID NO: 129, and the light chain set forth in SEQ ID NO: 167 or a sequence of amino acids that exhibits at least 85%, 90% or 95% sequence identity to SEQ ID NO: 167;
e) the heavy chain set forth in SEQ ID NO: 129 or a sequence of amino acids that exhibits at least 85%, 90% or 95% sequence identity to SEQ ID NO: 129, and the light chain set forth in SEQ ID NO: 174 or a sequence of amino acids that exhibits at least 85%, 90% or 95% sequence identity to SEQ ID NO: 174;
f) the heavy chain set forth in SEQ ID NO: 129 or a sequence of amino acids that exhibits at least 85%, 90% or 95% sequence identity to SEQ ID NO: 129, and the light chain set forth in SEQ ID NO: 181 or a sequence of amino acids that exhibits at least 85%, 90% or 95% sequence identity to SEQ ID NO: 181;
g) the heavy chain set forth in SEQ ID NO: 135 or a sequence of amino acids that exhibits at least 85%, 90% or 95% sequence identity to SEQ ID NO: 135, and the light chain set forth in SEQ ID NO: 181 or a sequence of amino acids that exhibits at least 85%, 90% or 95% sequence identity to SEQ ID NO: 181;
h) the heavy chain set forth in SEQ ID NO: 129 or a sequence of amino acids that exhibits at least 85%, 90% or 95% sequence identity to SEQ ID NO: 129, and the light chain set forth in SEQ ID NO: 188 or a sequence of amino acids that exhibits at least 85%, 90% or 95% sequence identity to SEQ ID NO: 188;
i) the heavy chain set forth in SEQ ID NO: 141 or a sequence of amino acids that exhibits at least 85%, 90% or 95% sequence identity to SEQ ID NO: 141, and the light chain set forth in SEQ ID NO: 181 or a sequence of amino acids that exhibits at least 85%, 90% or 95% sequence identity to SEQ ID NO: 181;
j) the heavy chain set forth in SEQ ID NO: 147 or a sequence of amino acids that exhibits at least 85%, 90% or 95% sequence identity to SEQ ID NO: 147, and the light chain set forth in SEQ ID NO: 195 or a sequence of amino acids that exhibits at least 85%, 90% or 95% sequence identity to SEQ ID NO: 195;
k) the heavy chain set forth in SEQ ID NO: 141 or a sequence of amino acids that exhibits at least 85%, 90% or 95% sequence identity to SEQ ID NO: 141, and the light chain set forth in SEQ ID NO: 195 or a sequence of amino acids that exhibits at least 85%, 90% or 95% sequence identity to SEQ ID NO: 195;
l) the heavy chain set forth in SEQ ID NO: 147 or a sequence of amino acids that exhibits at least 85%, 90% or 95% sequence identity to SEQ ID NO: 147, and the light chain set forth in SEQ ID NO: 202 or a sequence of amino acids that exhibits at least 85%, 90% or 95% sequence identity to SEQ ID NO: 202;
m) the heavy chain set forth in SEQ ID NO: 141 or a sequence of amino acids that exhibits at least 85%, 90% or 95% sequence identity to SEQ ID NO: 141, and the light chain set forth in SEQ ID NO: 202 or a sequence of amino acids that exhibits at least 85%, 90% or 95% sequence identity to SEQ ID NO: 202;
n) the heavy chain set forth in SEQ ID NO: 209 or a sequence of amino acids that exhibits at least 85%, 90% or 95% sequence identity to SEQ ID NO: 209, and the light chain set forth in SEQ ID NO: 251 or a sequence of amino acids that exhibits at least 85%, 90% or 95% sequence identity to SEQ ID NO: 251;
o) the heavy chain set forth in SEQ ID NO: 215 or a sequence of amino acids that exhibits at least 85%, 90% or 95% sequence identity to SEQ ID NO: 215, and the light chain set forth in SEQ ID NO: 251 or a sequence of amino acids that exhibits at least 85%, 90% or 95% sequence identity to SEQ ID NO: 251;
p) the heavy chain set forth in SEQ ID NO: 221 or a sequence of amino acids that exhibits at least 85%, 90% or 95% sequence identity to SEQ ID NO: 221, and the light chain set forth in SEQ ID NO: 258 or a sequence of amino acids that exhibits at least 85%, 90% or 95% sequence identity to SEQ ID NO: 258;
q) the heavy chain set forth in SEQ ID NO: 227 or a sequence of amino acids that exhibits at least 85%, 90% or 95% sequence identity to SEQ ID NO: 227, and the light chain set forth in SEQ ID NO: 258 or a sequence of amino acids that exhibits at least 85%, 90% or 95% sequence identity to SEQ ID NO: 258;
r) the heavy chain set forth in SEQ ID NO: 233 or a sequence of amino acids that exhibits at least 85%, 90% or 95% sequence identity to SEQ ID NO: 233, and the light chain set forth in SEQ ID NO: 265 or a sequence of amino acids that exhibits at least 85%, 90% or 95% sequence identity to SEQ ID NO: 265;
s) the heavy chain set forth in SEQ ID NO: 239 or a sequence of amino acids that exhibits at least 85%, 90% or 95% sequence identity to SEQ ID NO: 239, and the light chain set forth in SEQ ID NO: 272 or a sequence of amino acids that exhibits at least 85%, 90% or 95% sequence identity to SEQ ID NO: 272;
t) the heavy chain set forth in SEQ ID NO: 221 or a sequence of amino acids that exhibits at least 85%, 90% or 95% sequence identity to SEQ ID NO: 221, and the light chain set forth in SEQ ID NO: 272 or a sequence of amino acids that exhibits at least 85%, 90% or 95% sequence identity to SEQ ID NO: 272;
u) the heavy chain set forth in SEQ ID NO: 227 or a sequence of amino acids that exhibits at least 85%, 90% or 95% sequence identity to SEQ ID NO: 227, and the light chain set forth in SEQ ID NO: 272 or a sequence of amino acids that exhibits at least 85%, 90% or 95% sequence identity to SEQ ID NO: 272;
v) the heavy chain set forth in SEQ ID NO: 233 or a sequence of amino acids that exhibits at least 85%, 90% or 95% sequence identity to SEQ ID NO: 233, and the light chain set forth in SEQ ID NO: 279 or a sequence of amino acids that exhibits at least 85%, 90% or 95% sequence identity to SEQ ID NO: 279;
w) the heavy chain set forth in SEQ ID NO: 245 or a sequence of amino acids that exhibits at least 85%, 90% or 95% sequence identity to SEQ ID NO: 245, and the light chain set forth in SEQ ID NO: 279 or a sequence of amino acids that exhibits at least 85%, 90% or 95% sequence identity to SEQ ID NO: 279;
x) the heavy chain set forth in SEQ ID NO: 221 or a sequence of amino acids that exhibits at least 85%, 90% or 95% sequence identity to SEQ ID NO: 221, and the light chain set forth in SEQ ID NO: 279 or a sequence of amino acids that exhibits at least 85%, 90% or 95% sequence identity to SEQ ID NO: 279;
y) the heavy chain set forth in SEQ ID NO: 227 or a sequence of amino acids that exhibits at least 85%, 90% or 95% sequence identity to SEQ ID NO: 227, and the light chain set forth in SEQ ID NO: 279 or a sequence of amino acids that exhibits at least 85%, 90% or 95% sequence identity to SEQ ID NO: 279;
z) the heavy chain set forth in SEQ ID NO: 233 or a sequence of amino acids that exhibits at least 85%, 90% or 95% sequence identity to SEQ ID NO: 233, and the light chain set forth in SEQ ID NO: 286 or a sequence of amino acids that exhibits at least 85%, 90% or 95% sequence identity to SEQ ID NO: 286;
aa) the heavy chain set forth in SEQ ID NO: 245 or a sequence of amino acids that exhibits at least 85%, 90% or 95% sequence identity to SEQ ID NO: 245, and the light chain set forth in SEQ ID NO: 286 or a sequence of amino acids that exhibits at least 85%, 90% or 95% sequence identity to SEQ ID NO: 286;
bb) the heavy chain set forth in SEQ ID NO: 221 or a sequence of amino acids that exhibits at least 85%, 90% or 95% sequence identity to SEQ ID NO: 221, and the light chain set forth in SEQ ID NO: 286 or a sequence of amino acids that exhibits at least 85%, 90% or 95% sequence identity to SEQ ID NO: 286;
cc) the heavy chain set forth in SEQ ID NO: 227 or a sequence of amino acids that exhibits at least 85%, 90% or 95% sequence identity to SEQ ID NO: 227, and the light chain set forth in SEQ ID NO: 286 or a sequence of amino acids that exhibits at least 85%, 90% or 95% sequence identity to SEQ ID NO: 286;
dd) the heavy chain set forth in SEQ ID NO: 233 or a sequence of amino acids that exhibits at least 85%, 90% or 95% sequence identity to SEQ ID NO: 233, and the light chain set forth in SEQ ID NO: 293 or a sequence of amino acids that exhibits at least 85%, 90% or 95% sequence identity to SEQ ID NO: 293;
ee) the heavy chain set forth in SEQ ID NO: 245 or a sequence of amino acids that exhibits at least 85%, 90% or 95% sequence identity to SEQ ID NO: 245, and the light chain set forth in SEQ ID NO: 300 or a sequence of amino acids that exhibits at least 85%, 90% or 95% sequence identity to SEQ ID NO: 300;
ff) the heavy chain set forth in SEQ ID NO: 209 or a sequence of amino acids that exhibits at least 85%, 90% or 95% sequence identity to SEQ ID NO: 209, and the light chain set forth in SEQ ID NO: 300 or a sequence of amino acids that exhibits at least 85%, 90% or 95% sequence identity to SEQ ID NO: 300;
gg) the heavy chain set forth in SEQ ID NO: 209 or a sequence of amino acids that exhibits at least 85%, 90% or 95% sequence identity to SEQ ID NO: 209, and the light chain set forth in SEQ ID NO: 279 or a sequence of amino acids that exhibits at least 85%, 90% or 95% sequence identity to SEQ ID NO: 279; and
hh) the heavy chain set forth in SEQ ID NO: 209 or a sequence of amino acids that exhibits at least 85%, 90% or 95% sequence identity to SEQ ID NO: 209, and the light chain set forth in SEQ ID NO: 286 or a sequence of amino acids that exhibits at least 85%, 90% or 95% sequence identity to SEQ ID NO: 286.

23. The modified anti-EGFR antibody of claim 1, wherein the antibody exhibits a ratio of binding activity for EGFR of greater than 2.0 in the presence of a pH that is pH 6.0 to 6.5, inclusive compared to in the presence of or about pH 7.4, when measured under the same conditions except for the difference in pH.

24. The modified anti-EGFR antibody of claim 3, wherein the antibody exhibits a ratio of binding activity for EGFR of greater than 2.0 in the presence of a pH that is pH 6.0 to 6.5, inclusive compared to in the presence of or about pH 7.4, when measured under the same conditions except for the difference in pH.

25. The anti-EGFR antibody, or antigen-binding fragment, of claim 1 that is isolated or purified.

26. A conjugate, comprising an anti-EGFR antibody, or antigen-binding fragment thereof, of claim 1 linked directly or indirectly via a linker to a targeted agent.

27. A conjugate, comprising an anti-EGFR antibody, or antigen-binding fragment thereof, of claim 3 linked directly or indirectly via a linker to a targeted agent.

28. The conjugate of claim 27, wherein the conjugate has the following formula:
Ab-[(L)_{q}-(targeted agent)ₘ], wherein:
Ab is the anti-EGFR antibody or antigen-binding fragment thereof that binds to EGFR;
L is a linker for linking the Ab to the targeted agent;
m is at least 1;
q is 0 or more as long as the resulting conjugate binds to the EGFR;
the resulting conjugate binds to the EGFR.

29. The conjugate of claim 27, wherein the targeted agent is a therapeutic moiety.

30. The conjugate of claim 29, wherein the therapeutic moiety is a cytotoxic moiety, a radioisotope, a chemotherapeutic agent, a lytic peptide or a cytokine.

31. The conjugate of claim 29, wherein the therapeutic moiety is selected from among taxol; cytochalasin B; gramicidin D; ethidium bromide; emetine; mitomycin; etoposide; teniposide; vincristine; vinblastine; colchicine; doxorubicin; daunorubicin; dihydroxy anthracin dione; maytansine or an analog or derivative thereof; an auristatin or a functional peptide analog or derivative thereof; dolastatin 10 or 15 or an analogue thereof; irinotecan or an analogue thereof; mitoxantrone; mithramycin; actinomycin D; 1-dehydrotestosterone; a glucocorticoid; procaine; tetracaine; lidocaine; propranolol; puromycin; calicheamicin or an analog or derivative thereof; an antimetabolite; an alkylating agent; a platinum derivative; duocarmycin A, duocarmycin SA, rachelmycin (CC-1065), or an analog or derivative thereof; an antibiotic; pyrrolo[2,1-c][1, 4]-benzodiazepines (PBD); a toxin; ribonuclease (RNase); DNase I, Staphylococcal enterotoxin A; and pokeweed antiviral protein.

32. The conjugate of claim 31, wherein the therapeutic moiety is a maytansine derivative that is a maytansinoid selected from among ansamitocin and mertansine (DM1).

33. The conjugate of claim 32, wherein the linker L is selected from among N-succinimidyl-4(2-pyridylthio)propanoate (SPDP), succinimidyl-4-(N-maleimidomethyl)cyclohexane-1-carboxylate (SMCC) and N-succinimidyl-4-(2-pyridylthio)pentanoate (SPP).

34. The conjugate of claim 32, wherein:
the maytansinoid is DM1; and
the linker is succinimidyl-4-(N-maleimidomethyl)cyclohexane-1-carboxylate (SMCC).

35. The conjugate of claim of claim 31, wherein the therapeutic moiety is an auristatin or a functional peptide analog or derivative thereof that is monomethyl auristatin E (MMAE) or F (MMAF).

36. The conjugate of claim 35, wherein the linker comprises a group capable of reacting with a sulfhydryl group of the antibody.

37. The conjugate of claim 35, wherein the linker comprises a maleimide group or a bis-thiol alkylating reagent.

38. The conjugate of claim 37, wherein the linker comprises 4-(3-tosyl-2-(tosylmethyl)propanoyl)benzamide, maleimidocaproyl or maleimidopropanoyl (MP).

39. The conjugate of claim 35, wherein:
the targeted agent is MMAF;
the linker comprises maleimidocaproyl (MC); and
the (L)-(targeted agent) has the following structure:

[chemical structure]

40. The conjugate of claim 35, wherein:
the targeted agent is MMAE;
the linker comprises 6-maleimidocaproyl-valine-citrulline-p-aminobenzyloxycarbonyl (MC-vc-PAB); and
(L)-(targeted agent) has the following structure:

[chemical structure]

41. The conjugate of claim 35, wherein:
the targeted agent is MMAE;
the linker comprises 4-(3-tosyl-2-(tosylmethyl)propanoyl)benzamide-valine-citruline-p-aminobenzyloxycarbonyl; and
(L)-(targeted agent) has the following structure:

[chemical structure]

42. A nucleic acid molecule(s), selected from among:
a) a nucleic acid molecule comprising a sequence of nucleotides encoding an anti-EGFR antibody, or antigen-binding fragment thereof, of claim 1; and
b) a nucleic acid molecule, comprising a sequence of nucleotides encoding the heavy chain of any of the anti-EGFR antibody, or antigen-binding fragment thereof, of claim 1.

43. A vector, comprising the nucleic acid molecule(s) of claim 42.

44. A cell, comprising a vector or vectors of claim 43.

45. A method of making an anti-EGFR antibody, or antigen-binding fragment thereof, comprising expressing the heavy chain or light chain encoded from a vector or vectors of claim 43 encoding the heavy chain and the light chain in a suitable host cell and recovering the antibody.

46. A pharmaceutical composition comprising an anti-EGFR antibody or antigen-binding fragment of claim 1, and a pharmaceutically acceptable carrier or excipient.

47. A pharmaceutical composition comprising an anti-EGFR antibody or antigen-binding fragment of claim 3, and a pharmaceutically acceptable carrier or excipient.

48. A pharmaceutical composition comprising a conjugate of claim 27, and a pharmaceutically acceptable carrier or excipient.

49. The pharmaceutical composition of claim 46, comprising a stabilizing agent that is selected from among an amino acid, an amino acid derivative, an amine, a sugar, a polyols, a salt and a surfactant.

50. The pharmaceutical composition of claim 48, comprising a stabilizing agent that is selected from among an amino acid, an amino acid derivative, an amine, a sugar, a polyols, a salt and a surfactant.

51. The pharmaceutical composition of claim 50, wherein the stabilizing is a sugar or polyol selected from among glycerol, sorbitol, mannitol, inositol, sucrose and trehalose.

52. The pharmaceutical composition of claim 51, wherein the stabilizing agent is sucrose or trehalose.

53. The pharmaceutical composition of claim 50, wherein the stabilizing agent is a surfactant selected from among a polypropylene glycol, polyethylene glycol, glycerin, sorbitol, poloxamer and polysorbate.

54. The pharmaceutical composition of claim 53, wherein the surfactant is selected from among poloxamer 188, polysorbate 20 and polysorbate 80.

55. The pharmaceutical composition of claim 54, wherein the surfactant is polysorbate 80.

56. A method of treating a condition responsive to treatment with an anti-EGFR antibody in a subject, comprising administering to the subject a pharmaceutically effective amount of the pharmaceutical composition of claim 46.

57. A method of treating a condition responsive to treatment with an anti-EGFR antibody in a subject, comprising administering to the subject a pharmaceutically effective amount of the pharmaceutical composition of claim 47.

58. A method of treating a condition responsive to treatment with an anti-EGFR antibody in a subject, comprising administering to the subject a pharmaceutically effective amount of the pharmaceutical composition of claim 48.

59. The method of claim 58, wherein the condition responsive to treatment with an anti-EGFR antibody is a tumor, cancer or metastasis.

60. The method of claim 59, wherein the subject has a tumor that does not comprise a marker that confers resistance to anti-EGFR therapy.

61. The method of claim 60, wherein the marker is a mutation in KRAS, NRAS or BRAF.

62. An anti-EGFR antibody, or antigen-binding fragment thereof, comprising a variable heavy chain comprising amino acids 1-119 of the sequence set forth in SEQ ID NO: 57 and a variable light chain comprising the sequence of amino acids 1-107 of the sequence set forth in SEQ ID NO: 181, wherein the antibody comprises an asparagine (D) residue at the position corresponding to position 104 in SEQ ID NO: 57.

63. The modified anti-EGFR antibody, or antigen-binding fragment thereof, of claim 62 selected from among a full length antibody, Fab, Fab′, F(ab′)₂, single-chain Fv (scFv), Fv, dsFv, diabody, Fd and Fd′ fragments.

64. The modified anti-EGFR antibody, or antigen-binding fragment thereof, of claim 62, comprising a heavy chain comprising the sequence of amino acids set forth in SEQ ID NO: 57 and a light chain comprising the sequence of amino acids set forth in SEQ ID NO: 181, wherein the antibody comprises an asparagine (D) residue at the position corresponding to position 104 in SEQ ID NO: 57.

65. A conjugate, comprising an anti-EGFR antibody, or antigen-binding fragment thereof, of claim 62 linked directly or indirectly via a linker to a targeted agent.

66. A pharmaceutical composition comprising an anti-EGFR antibody or antigen-binding fragment of claim 62, and a pharmaceutically acceptable carrier or excipient.

67. A pharmaceutical composition comprising an anti-EGFR antibody or antigen-binding fragment of claim 65, and a pharmaceutically acceptable carrier or excipient.

68. A method of treating a condition responsive to treatment with an anti-EGFR antibody in a subject, comprising administering to the subject a pharmaceutically effective amount of the pharmaceutical composition of claim 66.

69. A method of treating a condition responsive to treatment with an anti-EGFR antibody in a subject, comprising administering to the subject a pharmaceutically effective amount of the pharmaceutical composition of claim 67.

The application's sequence listing, which the Patent Office published only in electronic form, follows.

SEQUENCE LISTING (394 sequences)

SEQ ID NO: 1 - protein, 449 aa, Artificial Sequence
  Cetuximab A119 R216 heavy chain
  DOMAIN (1)...(119): variable domain
  DOMAIN (120)...(217): CH1
  DOMAIN (218)...(232): hinge region
  DOMAIN (233)...(342): CH2
  DOMAIN (343)...(449): CH3
QVQLKQSGPGLVQPSQSLSITCTVSGFSLTNYGVHWVRQSPGKGLEWLGVIWSGGNTDYNTPFTSRLSINKDNSKSQVFFKMNSLQSNDTAIYYCARALTYYDYEFAYWGQGTLVTVSAASTKGPSVFPLAPSSKSTSGGTAALGCLVKDYFPEPVTVSWNSGALTSGVHTFPAVLQSSGLYSLSSVVTVPSSSLGTQTYICNVNHKPSNTKVDKRVEPKSCDKTHTCPPCPAPELLGGPSVFLFPPKPKDTLMISRTPEVTCVVVDVSHEDPEVKFNWYVDGVEVHNAKTKPREEQYNSTYRVVSVLTVLHQDWLNGKEYKCKVSNKALPAPIEKTISKAKGQPREPQVYTLPPSRDELTKNQVSLTCLVKGFYPSDIAVEWESNGQPENNYKTTPPVLDSDGSFFLYSKLTVDKSRWQQGNVFSCSVMHEALHNHYTQKSLSLSPGK

SEQ ID NO: 2 - protein, 119 aa, Artificial Sequence
  Cetuximab A119 heavy chain variable domain
QVQLKQSGPGLVQPSQSLSITCTVSGFSLTNYGVHWVRQSPGKGLEWLGVIWSGGNTDYNTPFTSRLSINKDNSKSQVFFKMNSLQSNDTAIYYCARALTYYDYEFAYWGQGTLVTVSA

SEQ ID NO: 3 - protein, 213 aa, Artificial Sequence
  Cetuximab A100 LELK104-107 A213 light chain
  DOMAIN (1)...(107): variable domain
  DOMAIN (108)...(213): constant domain
DILLTQSPVILSVSPGERVSFSCRASQSIGTNIHWYQQRTNGSPRLLIKYASESISGIPSRFSGSGSGTDFTLSINSVESEDIADYYCQQNNNWPTTFGAGTKLELKRTVAAPSVFIFPPSDEQLKSGTASVVCLLNNFYPREAKVQWKVDNALQSGNSQESVTEQDSKDSTYSLSSTLTLSKADYEKHKVYACEVTHQGLSSPVTKSFNRGA

SEQ ID NO: 4 - protein, 107 aa, Artificial Sequence
  Cetuximab A100 LELK104-107 light chain variable domain
DILLTQSPVILSVSPGERVSFSCRASQSIGTNIHWYQQRTNGSPRLLIKYASESISGIPSRFSGSGSGTDFTLSINSVESEDIADYYCQQNNNWPTTFGAGTKLELK

SEQ ID NO: 5 - protein, 452 aa, Artificial Sequence
  Cetuximab A119 R216 Ins222PKS heavy chain
  DOMAIN (1)...(119): variable domain
  DOMAIN (120)...(217): CH1
  DOMAIN (218)...(235): hinge region
  DOMAIN (236)...(345): CH2
  DOMAIN (346)...(452): CH3
QVQLKQSGPGLVQPSQSLSITCTVSGFSLTNYGVHWVRQSPGKGLEWLGVIWSGGNTDYNTPFTSRLSINKDNSKSQVFFKMNSLQSNDTAIYYCARALTYYDYEFAYWGQGTLVTVSAASTKGPSVFPLAPSSKSTSGGTAALGCLVKDYFPEPVTVSWNSGALTSGVHTFPAVLQSSGLYSLSSVVTVPSSSLGTQTYICNVNHKPSNTKVDKRVEPKSPKSCDKTHTCPPCPAPELLGGPSVFLFPPKPKDTLMISRTPEVTCVVVDVSHEDPEVKFNWYVDGVEVHNAKTKPREEQYNSTYRVVSVLTVLHQDWLNGKEYKCKVSNKALPAPIEKTISKAKGQPREPQVYTLPPSRDELTKNQVSLTCLVKGFYPSDIAVEWESNGQPENNYKTTPPVLDSDGSFFLYSKLTVDKSRWQQGNVFSCSVMHEALHNHYTQKSLSLSPGK

SEQ ID NO: 6 - protein, 449 aa, Artificial Sequence
  Cetuximab S119 K216 heavy chain
  DOMAIN (1)...(119): variable domain
  DOMAIN (120)...(217): CH1
  DOMAIN (218)...(232): hinge region
  DOMAIN (233)...(342): CH2
  DOMAIN (343)...(449): CH3
QVQLKQSGPGLVQPSQSLSITCTVSGFSLTNYGVHWVRQSPGKGLEWLGVIWSGGNTDYNTPFTSRLSINKDNSKSQVFFKMNSLQSNDTAIYYCARALTYYDYEFAYWGQGTLVTVSSASTKGPSVFPLAPSSKSTSGGTAALGCLVKDYFPEPVTVSWNSGALTSGVHTFPAVLQSSGLYSLSSVVTVPSSSLGTQTYICNVNHKPSNTKVDKKVEPKSCDKTHTCPPCPAPELLGGPSVFLFPPKPKDTLMISRTPEVTCVVVDVSHEDPEVKFNWYVDGVEVHNAKTKPREEQYNSTYRVVSVLTVLHQDWLNGKEYKCKVSNKALPAPIEKTISKAKGQPREPQVYTLPPSRDELTKNQVSLTCLVKGFYPSDIAVEWESNGQPENNYKTTPPVLDSDGSFFLYSKLTVDKSRWQQGNVFSCSVMHEALHNHYTQKSLSLSPGK

SEQ ID NO: 7 - protein, 119 aa, Artificial Sequence
  Cetuximab S119 heavy chain variable domain
QVQLKQSGPGLVQPSQSLSITCTVSGFSLTNYGVHWVRQSPGKGLEWLGVIWSGGNTDYNTPFTSRLSINKDNSKSQVFFKMNSLQSNDTAIYYCARALTYYDYEFAYWGQGTLVTVSS

SEQ ID NO: 8 - protein, 214 aa, Artificial Sequence
  Cetuximab Q100 VEIK104-107 EC213-214 light chain
  DOMAIN (1)...(107): variable domain
  DOMAIN (108)...(214): constant domain
DILLTQSPVILSVSPGERVSFSCRASQSIGTNIHWYQQRTNGSPRLLIKYASESISGIPSRFSGSGSGTDFTLSINSVESEDIADYYCQQNNNWPTTFGQGTKVEIKRTVAAPSVFIFPPSDEQLKSGTASVVCLLNNFYPREAKVQWKVDNALQSGNSQESVTEQDSKDSTYSLSSTLTLSKADYEKHKVYACEVTHQGLSSPVTKSFNRGEC

SEQ ID NO: 9 - protein, 107 aa, Artificial Sequence
  Cetuximab Q100 VEIK104-107 light chain variable domain
DILLTQSPVILSVSPGERVSFSCRASQSIGTNIHWYQQRTNGSPRLLIKYASESISGIPSRFSGSGSGTDFTLSINSVESEDIADYYCQQNNNWPTTFGQGTKVEIK

SEQ ID NO: 10 - protein, 213 aa, Artificial Sequence
  Cetuximab Q100 LELK104-107 A213 light chain
  DOMAIN (1)...(107): variable domain
  DOMAIN (108)...(213): constant domain
DILLTQSPVILSVSPGERVSFSCRASQSIGTNIHWYQQRTNGSPRLLIKYASESISGIPSRFSGSGSGTDFTLSINSVESEDIADYYCQQNNNWPTTFGQGTKLELKRTVAAPSVFIFPPSDEQLKSGTASVVCLLNNFYPREAKVQWKVDNALQSGNSQESVTEQDSKDSTYSLSSTLTLSKADYEKHKVYACEVTHQGLSSPVTKSFNRGA

SEQ ID NO: 11 - protein, 107 aa, Artificial Sequence
  Cetuximab Q100 LELK104-107 light chain variable domain
DILLTQSPVILSVSPGERVSFSCRASQSIGTNIHWYQQRTNGSPRLLIKYASESISGIPSRFSGSGSGTDFTLSINSVESEDIADYYCQQNNNWPTTFGQGTKLELK

SEQ ID NO: 12 - protein, 449 aa, Artificial Sequence
  Cetuximab A119 R216 E358 M360 heavy chain
  DOMAIN (1)...(119): variable domain
  DOMAIN (120)...(217): CH1
  DOMAIN (218)...(232): hinge region
  DOMAIN (233)...(342): CH2
  DOMAIN (343)...(449): CH3
QVQLKQSGPGLVQPSQSLSITCTVSGFSLTNYGVHWVRQSPGKGLEWLGVIWSGGNTDYNTPFTSRLSINKDNSKSQVFFKMNSLQSNDTAIYYCARALTYYDYEFAYWGQGTLVTVSAASTKGPSVFPLAPSSKSTSGGTAALGCLVKDYFPEPVTVSWNSGALTSGVHTFPAVLQSSGLYSLSSVVTVPSSSLGTQTYICNVNHKPSNTKVDKRVEPKSCDKTHTCPPCPAPELLGGPSVFLFPPKPKDTLMISRTPEVTCVVVDVSHEDPEVKFNWYVDGVEVHNAKTKPREEQYNSTYRVVSVLTVLHQDWLNGKEYKCKVSNKALPAPIEKTISKAKGQPREPQVYTLPPSREEMTKNQVSLTCLVKGFYPSDIAVEWESNGQPENNYKTTPPVLDSDGSFFLYSKLTVDKSRWQQGNVFSCSVMHEALHNHYTQKSLSLSPGK

SEQ ID NO: 13 - protein, 214 aa, Artificial Sequence
  Cetuximab A100 LELK104-107 EC213-214 light chain
  DOMAIN (1)...(107): variable domain
  DOMAIN (108)...(214): constant domain
DILLTQSPVILSVSPGERVSFSCRASQSIGTNIHWYQQRTNGSPRLLIKYASESISGIPSRFSGSGSGTDFTLSINSVESEDIADYYCQQNNNWPTTFGAGTKLELKRTVAAPSVFIFPPSDEQLKSGTASVVCLLNNFYPREAKVQWKVDNALQSGNSQESVTEQDSKDSTYSLSSTLTLSKADYEKHKVYACEVTHQGLSSPVTKSFNRGEC

SEQ ID NO: 14 - protein, 119 aa, Artificial Sequence
  Humanized Cetuximab (H225) heavy chain variable domain
EVQLVESGGGLVQPGGSLRLSCAVSGFSLTNYGVHWVRQATGKGLEWLGVIWSGGNTDYNTPFTSRLTISKENAKNSLYLQMNSLRAGDTAVYYCARALTYYDYEFAYWGQGTMVTVSS

SEQ ID NO: 15 - protein, 107 aa, Artificial Sequence
  Humanized Cetuximab (H225) light chain variable domain
EIVLTQSPATLSLSPGERATLSCRASQSIGTNIHWYQQRPGQAPRLLIKYASESISGIPARFSGSGSGTDFTLTISSLEPEDFAVYYCQQNNNWPTTFGGGTKVEIK

SEQ ID NO: 16 - protein, 119 aa, Artificial Sequence
  Humanized Cetuximab (Hu225) Heavy Chain Variable domain
EVQLVESGGGLVQPGGSLRLSCAASGFSLTNYGVHWVRQAPGKGLEWLGVIWSGGNTDYNTPFTSRLTINKDNSKNTVYLQMNSLRAEDTAVYYCARALTYYDYEFAYWGQGTLVTVSS

SEQ ID NO: 17 - protein, 107 aa, Artificial Sequence
  Humanized Cetuximab (Hu225) Light Chain Variable domain
DILLTQSPGTLSLSPGERATLSCRASQSIGTNIHWYQQKPGQAPRLLIKYASESISGIPDRFSGSGSGTDFTLTISRLEPEDFAVYYCQQNNNWPTTFGQGTKLEIK

SEQ ID NO: 18 - protein, 457 aa, Artificial Sequence
  Cetuximab S119 K216 Heavy Chain with Flag Tag
  DOMAIN (1)...(119): variable domain
  DOMAIN (120)...(449): constant domain
  PEPTIDE (450)...(457): Flag tag
QVQLKQSGPGLVQPSQSLSITCTVSGFSLTNYGVHWVRQSPGKGLEWLGVIWSGGNTDYNTPFTSRLSINKDNSKSQVFFKMNSLQSNDTAIYYCARALTYYDYEFAYWGQGTLVTVSSASTKGPSVFPLAPSSKSTSGGTAALGCLVKDYFPEPVTVSWNSGALTSGVHTFPAVLQSSGLYSLSSVVTVPSSSLGTQTYICNVNHKPSNTKVDKKVEPKSCDKTHTCPPCPAPELLGGPSVFLFPPKPKDTLMISRTPEVTCVVVDVSHEDPEVKFNWYVDGVEVHNAKTKPREEQYNSTYRVVSVLTVLHQDWLNGKEYKCKVSNKALPAPIEKTISKAKGQPREPQVYTLPPSRDELTKNQVSLTCLVKGFYPSDIAVEWESNGQPENNYKTTPPVLDSDGSFFLYSKLTVDKSRWQQGNVFSCSVMHEALHNHYTQKSLSLSPGKDYKDDDDK

SEQ ID NO: 19 - protein, 330 aa, Homo sapiens [sequence omitted]

SEQ ID NO: 20 - protein, 330 aa, Artificial Sequence
  Cetuximab R216 heavy chain constant domain
  DOMAIN (1)...(98): CH1
  DOMAIN (99)...(113): hinge region
  DOMAIN (114)...(223): CH2
  DOMAIN (224)...(328): CH3
ASTKGPSVFPLAPSSKSTSGGTAALGCLVKDYFPEPVTVSWNSGALTSGVHTFPAVLQSSGLYSLSSVVTVPSSSLGTQTYICNVNHKPSNTKVDKRVEPKSCDKTHTCPPCPAPELLGGPSVFLFPPKPKDTLMISRTPEVTCVVVDVSHEDPEVKFNWYVDGVEVHNAKTKPREEQYNSTYRVVSVLTVLHQDWLNGKEYKCKVSNKALPAPIEKTISKAKGQPREPQVYTLPPSRDELTKNQVSLTCLVKGFYPSDIAVEWESNGQPENNYKTTPPVLDSDGSFFLYSKLTVDKSRWQQGNVFSCSVMHEALHNHYTQKSLSLSPGK

SEQ ID NO: 21 - protein, 333 aa, Artificial Sequence
  Cetuximab R216 Ins222PKS heavy chain constant domain
  DOMAIN (1)...(98): CH1
  DOMAIN (99)...(116): hinge region
  DOMAIN (117)...(226): CH2
  DOMAIN (227)...(331): CH3
ASTKGPSVFPLAPSSKSTSGGTAALGCLVKDYFPEPVTVSWNSGALTSGVHTFPAVLQSSGLYSLSSVVTVPSSSLGTQTYICNVNHKPSNTKVDKRVEPKSPKSCDKTHTCPPCPAPELLGGPSVFLFPPKPKDTLMISRTPEVTCVVVDVSHEDPEVKFNWYVDGVEVHNAKTKPREEQYNSTYRVVSVLTVLHQDWLNGKEYKCKVSNKALPAPIEKTISKAKGQPREPQVYTLPPSRDELTKNQVSLTCLVKGFYPSDIAVEWESNGQPENNYKTTPPVLDSDGSFFLYSKLTVDKSRWQQGNVFSCSVMHEALHNHYTQKSLSLSPGK

SEQ ID NO: 22 - protein, 330 aa, Artificial Sequence [sequence omitted]

SEQ ID NO: 23 - protein, 330 aa, Artificial Sequence
  Cetuximab R216 E358 M360 heavy chain constant domain
  DOMAIN (1)...(98): CH1
  DOMAIN (99)...(113): hinge region
  DOMAIN (114)...(223): CH2
  DOMAIN (224)...(328): CH3
ASTKGPSVFPLAPSSKSTSGGTAALGCLVKDYFPEPVTVSWNSGALTSGVHTFPAVLQSSGLYSLSSVVTVPSSSLGTQTYICNVNHKPSNTKVDKRVEPKSCDKTHTCPPCPAPELLGGPSVFLFPPKPKDTLMISRTPEVTCVVVDVSHEDPEVKFNWYVDGVEVHNAKTKPREEQYNSTYRVVSVLTVLHQDWLNGKEYKCKVSNKALPAPIEKTISKAKGQPREPQVYTLPPSREEMTKNQVSLTCLVKGFYPSDIAVEWESNGQPENNYKTTPPVLDSDGSFFLYSKLTVDKSRWQQGNVFSCSVMHEALHNHYTQKSLSLSPGK

SEQ ID NO: 24 - protein, 326 aa, Homo sapiens
  human IgG2
  DOMAIN (1)...(98): CH1
  DOMAIN (99)...(110): hinge region
  DOMAIN (111)...(219): CH2
  DOMAIN (220)...(326): CH3
ASTKGPSVFPLAPCSRSTSESTAALGCLVKDYFPEPVTVSWNSGALTSGVHTFPAVLQSSGLYSLSSVVTVPSSNFGTQTYTCNVDHKPSNTKVDKTVERKCCVECPPCPAPPVAGPSVFLFPPKPKDTLMISRTPEVTCVVVDVSHEDPEVQFNWYVDGVEVHNAKTKPREEQFNSTFRVVSVLTVVHQDWLNGKEYKCKVSNKGLPAPIEKTISKTKGQPREPQVYTLPPSREEMTKNQVSLTCLVKGFYPSDIAVEWESNGQPENNYKTTPPMLDSDGSFFLYSKLTVDKSRWQQGNVFSCSVMHEALHNHYTQKSLSLSPGK

SEQ ID NO: 25 - protein, 377 aa, Homo sapiens
  human IgG3
  DOMAIN (1)...(98): CH1
  DOMAIN (99)...(160): hinge region
  DOMAIN (161)...(270): CH2
  DOMAIN (271)...(376): CH3
ASTKGPSVFPLAPCSRSTSGGTAALGCLVKDYFPEPVTVSWNSGALTSGVHTFPAVLQSSGLYSLSSVVTVPSSSLGTQTYTCNVNHKPSNTKVDKRVELKTPLGDTTHTCPRCPEPKSCDTPPPCPRCPEPKSCDTPPPCPRCPEPKSCDTPPPCPRCPAPELLGGPSVFLFPPKPKDTLMISRTPEVTCVVVDVSHEDPEVQFKWYVDGVEVHNAKTKPREEQYNSTFRVVSVLTVLHQDWLNGKEYKCKVSNKALPAPIEKTISKTKGQPREPQVYTLPPSREEMTKNQVSLTCLVKGFYPSDIAVEWESSGQPENNYNTTPPMLDSDGSFFLYSKLTVDKSRWQQGNIFSCSVMHEALHNRFTQKSLSLSPGK

SEQ ID NO: 26 - protein, 327 aa, Homo sapiens
  human IgG4
  DOMAIN (1)...(98): CH1
  DOMAIN (99)...(110): hinge region
  DOMAIN (111)...(220): CH2
  DOMAIN (221)...(327): CH3
ASTKGPSVFPLAPCSRSTSESTAALGCLVKDYFPEPVTVSWNSGALTSGVHTFPAVLQSSGLYSLSSVVTVPSSSLGTKTYTCNVDHKPSNTKVDKRVESKYGPPCPSCPAPEFLGGPSVFLFPPKPKDTLMISRTPEVTCVVVDVSQEDPEVQFNWYVDGVEVHNAKTKPREEQFNSTYRVVSVLTVLHQDWLNGKEYKCKVSNKGLPSSIEKTISKAKGQPREPQVYTLPPSQEEMTKNQVSLTCLVKGFYPSDIAVEWESNGQPENNYKTTPPVLDSDGSFFLYSRLTVDKSRWQEGNVFSCSVMHEALHNHYTQKSLSLSLGK

SEQ ID NO: 27 - protein, 231 aa, Homo sapiens
  human IgG1 Fc
PKSCDKTHTCPPCPAPELLGGPSVFLFPPKPKDTLMISRTPEVTCVVVDVSHEDPEVKFNWYVDGVEVHNAKTKPREEQYNSTYRVVSVLTVLHQDWLNGKEYKCKVSNKALPAPIEKTISKAKGQPREPQVYTLPPSRDELTKNQVSLTCLVKGFYPSDIAVEWESNGQPENNYKTTPPVLDSDGSFFLYSKLTVDKSRWQQGNVFSCSVMHEALHNHYTQKSLSLSPGK

SEQ ID NO: 28 - protein, 232 aa, Homo sapiens
  human IgG1 native C-terminus of Fc domain
EPRSCDKTHTCPPCPAPELLGGPSVFLFPPKPKDTLMISRTPEVTCVVVDVSHEDPEVKFNWYVDGVEVHNAKTKPREEQYNSTYRVVSVLTVLHQDWLNGKDYKCKVSNKALPAPMQKTISKAKGQPREPQVYTLPPSRDELTKNQVSLTCLVKGFYPRHIAVEWESNGQPENNYKTTPPVLDSDGSFFLYSKLTVDKSRWQQGNVFSCSVMHEALHNHYTQKSLSLSPGK

SEQ ID NO: 29 - DNA, 1347 bp, Artificial Sequence
  Cetuximab A119 R216 E358 M360 heavy chain DNA
  V_region (1)...(357)
  C_region (358)...(1347)
caggtgcagctgaagcagtcaggacctggcctagtgcagccctcacagagcctgtccatcacctgcacagtctctggtttctcattaactaactatggtgtacactgggttcgccagtctccaggaaagggtctggagtggctgggagtgatatggagtggtggaaacacagactataatacacctttcacatccagactgagcatcaacaaggacaattccaagagccaagttttctttaaaatgaacagtctgcaatctaatgacacagccatatattactgtgccagagccctcacctactatgattacgagtttgcttactggggccaagggactctggtcactgtctctgcagcctccaccaagggcccatcggtcttccccctggcaccctcctccaagagcacctctgggggcacagcggccctgggctgcctggtcaaggactacttccccgaaccggtgacggtgtcgtggaactcaggcgccctgaccagcggcgtgcacaccttcccggctgtcctacagtcctcaggactctactccctcagcagcgtggtgaccgtgccctccagcagcttgggcacccagacctacatctgcaacgtgaatcacaagcccagcaacaccaaggtggacaagagagttgagcccaaatcttgtgacaaaactcacacatgcccaccgtgcccagcacctgaactcctggggggaccgtcagtcttcctcttccccccaaaacccaaggacaccctcatgatctcccggacccctgaggtcacatgcgtggtggtggacgtgagccacgaagaccctgaggtcaagttcaactggtacgtggacggcgtggaggtgcataatgccaagacaaagccgcgggaggagcagtacaacagcacgtaccgtgtggtcagcgtcctcaccgtcctgcaccaggactggctgaatggcaaggagtacaagtgcaaggtctccaacaaagccctcccagcccccatcgagaaaaccatctccaaagccaaagggcagccccgagaaccacaggtgtacaccctgcccccatcccgggaggagatgaccaagaaccaggtcagcctgacctgcctggtcaaaggcttctatcccagcgacatcgccgtggagtgggagagcaatgggcagccggagaacaactacaagaccacgcctcccgtgctggactccgacggctccttcttcctctatagcaagctcaccgtggacaagagcaggtggcagcaggggaacgtcttctcatgctccgtgatgcatgaggctctgcacaaccactacacgcagaagagcctctccctgtccccgggtaaa

SEQ ID NO: 30 - DNA, 642 bp, Artificial Sequence
  Cetuximab A100 LELK104-107 EC213-214 light chain DNA
  V_region (1)...(321)
  C_region (322)...(642)
gacatcttgctgactcagtctccagtcatcctgtctgtgagtccaggagaaagagtcagtttctcctgcagggccagtcagagtattggcacaaacatacactggtatcagcaaagaacaaatggttctccaaggcttctcataaagtatgcttctgagtctatctctgggatcccttccaggtttagtggcagtggatcagggacagattttactcttagcatcaacagtgtggagtctgaagatattgcagattattactgtcaacaaaataataactggccaaccacgttcggtgctgggaccaagctggagctgaaacgaactgtggctgcaccatctgtcttcatcttcccgccatctgatgagcagttgaaatctggaactgcctctgttgtgtgcctgctgaataacttctatcccagagaggccaaagtacagtggaaggtggataacgccctccaatcgggtaactcccaggagagtgtcacagagcaggacagcaaggacagcacctacagcctcagcagcaccctgacgctgagcaaagcagactacgagaaacacaaagtctacgcctgcgaagtcacccatcagggcctgagctcgcccgtcacaaagagcttcaacaggggagagtgt

SEQ ID NO: 31 - protein, 107 aa, Homo sapiens [sequence omitted]

SEQ ID NO: 32 - protein, 104 aa, Homo sapiens
  human lambda light chain constant domain
QPKAAPSVTLFPPSSEELQANKATLVCLISDFYPGAVTVAWKADSSPVKAGVETTTPSKQSNNKYAASSYLSLTPEQWKSHRSYSCQVTHEGSTVEKTVAPTEC

SEQ ID NO: 33 - protein, 106 aa, Artificial Sequence
  Cetuximab A213 kappa light chain constant domain
RTVAAPSVFIFPPSDEQLKSGTASVVCLLNNFYPREAKVQWKVDNALQSGNSQESVTEQDSKDSTYSLSSTLTLSKADYEKHKVYACEVTHQGLSSPVTKSFNRGA

SEQ ID NO: 34 - protein, 107 aa, Artificial Sequence [sequence omitted]

SEQ ID NO: 35 - protein, 5 aa, Artificial Sequence
  Cetuximab CDRH1
NYGVH

SEQ ID NO: 36 - protein, 16 aa, Artificial Sequence
  Cetuximab CDRH2
VIWSGGNTDYNTPFTS

SEQ ID NO: 37 - protein, 11 aa, Artificial Sequence
  Cetuximab CDRH3
ALTYYDYEFAY

SEQ ID NO: 38 - protein, 11 aa, Artificial Sequence
  Cetuximab CDRL1
RASQSIGTNIH

SEQ ID NO: 39 - protein, 7 aa, Artificial Sequence
  Cetuximab CDRL2
YASESIS

SEQ ID NO: 40 - protein, 9 aa, Artificial Sequence
  Cetuximab CDRL3
QQNNNWPTT

SEQ ID NO: 41 - protein, 19 aa, Artificial Sequence
  Heavy chain signal sequence
MEFGLSWLFLVAILKGVQC

SEQ ID NO: 42 - protein, 22 aa, Artificial Sequence
  Light chain signal sequence
MDMRVPAQLLGLLLLWLPGAKC

SEQ ID NO: 43 - protein, 1210 aa, Homo sapiens [sequence omitted]

SEQ ID NO: 44 - protein, 6 aa, Artificial Sequence
  His tag
HHHHHH

SEQ ID NO: 45 - protein, 8 aa, Artificial Sequence
  Flag tag
DYKDDDDK

SEQ ID NO: 46 - protein, 15 aa, Artificial Sequence
  (Gly4Ser)3 Linker
GGGGSGGGGSGGGGS

SEQ ID NO: 47 - DNA, 4136 bp, Artificial Sequence
  Cetuximab heavy chain S119 K216/light chain Q100 VEIK104-107 EC213-214 DNA
  sig_peptide (1109)...(1174): light chain signal sequence
  V_region (1175)...(1495): light chain variable domain
  C_region (1496)...(1816): light chain constant domain
  RBS (1859)...(2433): IRES
  sig_peptide (2447)...(2503): heavy chain signal sequence
  V_region (2504)...(2860): heavy chain variable domain
  C_region (2861)...(3850): heavy chain constant domain
  misc_feature (3851)...(3874): Flag tag
tcaatattggccattagccatattattcattggttatatagcataaatcaatattggctattggccattgcatacgttgtatctatatcataatatgtacatttatattggctcatgtccaatatgaccgccatgttggcattgattattgactagttattaatagtaatcaattacggggtcattagttcatagcccatatatggagttccgcgttacataacttacggtaaatggcccgcctggctgaccgcccaacgacccccgcccattgacgtcaataatgacgtatgttcccatagtaacgccaatagggactttccattgacgtcaatgggtggagtatttacggtaaactgcccacttggcagtacatcaagtgtatcatatgccaagtccgccccctattgacgtcaatgacggtaaatggcccgcctggcattatgcccagtacatgaccttacgggactttcctacttggcagtacatctacgtattagtcatcgctattaccatggtgatgcggttttggcagtacaccaattggcgtggatagcggtttgactcacggggatttccaagtctccaccccattgacgtcaatgggagtttgttttggcaccaaaatcaacgggactttccaaaatgtcgtaacaactgcgatcgcccgccccgttgacgcaaatgggcggtaggcgtgtacggtgggaggtctatataagcagagctcgtttagtgaaccgtcagatcactagaagctttattgcggtagtttatcacagttaaattgctaacgcagtcagtgcttctgacacaacagtctcgaacttaagctgcagtgactctcttaaggtagccttgcagaagttggtcgtgaggcactgggcaggtaagtatcaaggttacaagacaggtttaaggtgaccaatagaaactgggcttgtcgagacagagaagactcttgcgtttctgataggcacctattggtcttactgacatccactttgcctttctctccacaggtgtccactcccagttcaattacagctcttaaggctagagtacttaatacgactcactataggctagtctcgtcgacgagactagcatggacatgagggtccccgctcagctcctggggctcctgctgctctggctcccaggtgccaagtgtgacatcttgctgactcagtctccagtcatcctgtctgtgagtccaggagaaagagtcagtttctcctgcagggccagtcagagtattggcacaaacatacactggtatcagcaaagaacaaatggttctccaaggcttctcataaagtatgcttctgagtctatctctgggatcccttccaggtttagtggcagtggatcagggacagattttactcttagcatcaacagtgtggagtctgaagatattgcagattattactgtcaacaaaataataactggccaaccacgttcggccaagggaccaaggtggaaatcaaacgtacggtggctgcaccatctgtcttcatcttcccgccatctgatgagcagttgaaatctggaactgcctctgttgtgtgcctgctgaataacttctatcccagagaggccaaagtacagtggaaggtggataacgccctccaatcgggtaactcccaggagagtgtcacagagcaggacagcaaggacagcacctacagcctcagcagcaccctgacgctgagcaaagcagactacgagaaacacaaagtctacgcctgcgaagtcacccatcagggcctgagctcgcccgtcacaaagagcttcaacaggggagagtgttgactcgaggcgcgccgagcatgcatctagggcggccaattccgcccctctccccccccccccctaacgttactggccgaagccgcttggaataaggccggtgtgcgtttgtctatatgttattttccaccatattgccgtcttttggcaatgtgagggcccggaaacctggccctgtcttcttgacgagcattcctaggggtctttcccctctcgccaaaggaatgcaaggtctgttgaatgtcgtgaaggaagcagttcctctggaagcttcttgaagacaaacaacgtctgtagcgaccctttgcaggcagcggaaccccccacctggcgacaggtgcctctgcggccaaaagccacgtgtataagatacacctgcaaaggcggcacaaccccagtgccacgttgtgagttggatagttgtggaaagagtcaaatggctctcctcaagcgtattcaacaaggggctgaaggatgcccagaaggtaccccattgtatgggatctgatctggggcctcggtgcacatgctttacatgtgtttagtcgaggttaaaaaaacgtctaggccccccgaaccacggggacgtggttttcctttgaaaaacacgatgataatatggccacaaccatggagtttgggctgagctggctttttcttgtggctattttaaaaggtgtccagtgtcaggtgcagctgaagcagtcaggacctggcctagtgcagccctcacagagcctgtccatcacctgcacagtctctggtttctcattaactaactatggtgtacactgggttcgccagtctccaggaaagggtctggagtggctgggagtgatatggagtggtggaaacacagactataatacacctttcacatccagactgagcatcaacaaggacaattccaagagccaagttttctttaaaatgaacagtctgcaatctaatgacacagccatatattactgtgccagagccctcacctactatgattacgagtttgcttactggggccagggaacgctggtcaccgtcagctcagcctccaccaagggcccatcggtcttccccctggcaccctcctccaagagcacctctgggggcacagcggccctgggctgcctggtcaaggactacttccccgaaccggtgacggtgtcgtggaactcaggcgccctgaccagcggcgtgcacaccttcccggctgtcctacagtcctcaggactctactccctcagcagcgtggtgaccgtgccctccagcagcttgggcacccagacctacatctgcaacgtgaatcacaagcccagcaacaccaaggtggacaagaaagttgagcccaaatcttgtgacaaaactcacacatgcccaccgtgcccagcacctgaactcctggggggaccgtcagtcttcctcttccccccaaaacccaaggacaccctcatgatctcccggacccctgaggtcacatgcgtggtggtggacgtgagccacgaagaccctgaggtcaagttcaactggtacgtggacggcgtggaggtgcataatgccaagacaaagccgcgggaggagcagtacaacagcacgtaccgtgtggtcagcgtcctcaccgtcctgcaccaggactggctgaatggcaaggagtacaagtgcaaggtcagcaacaaagccctcccagcccccatcgagaaaaccatctccaaagccaaagggcagccccgagaaccacaggtgtacaccctgcccccatcccgggatgagctgaccaagaaccaggtcagcctgacctgcctggtcaaaggcttctatcccagcgacatcgccgtggagtgggagagcaatgggcagccggagaacaactacaagaccacgcctcccgtgctggactccgacggctccttcttcctctacagcaagctcaccgtggacaagagcaggtggcagcaggggaacgtcttctcatgctccgtgatgcatgaggctctgcacaaccactacacgcagaagagcctctccctgtctccgggtaaagattacaaggatgacgacgataagtgagcggccgcttccctttagtgagggttaatgcttcgagcagacatgataagatacattgatgagtttggacaaaccacaactagaatgcagtgaaaaaaatgctttatttgtgaaatttgtgatgctattgctttatttgtaaccattataagctgcaataaacaagttaacaacaacaattgcattcattttatgtttcaggttcagggggagatgtgggaggttttttaaagcaagtaaaacctctacaaatgtggta

SEQ ID NO: 48 - DNA, 1347 bp, Artificial Sequence
  Cetuximab heavy chain S119 K216 DNA
  V_region (1)...(357)
  C_region (358)...(1347)
caggtgcagctgaagcagtcaggacctggcctagtgcagccctcacagagcctgtccatcacctgcacagtctctggtttctcattaactaactatggtgtacactgggttcgccagtctccaggaaagggtctggagtggctgggagtgatatggagtggtggaaacacagactataatacacctttcacatccagactgagcatcaacaaggacaattccaagagccaagttttctttaaaatgaacagtctgcaatctaatgacacagccatatattactgtgccagagccctcacctactatgattacgagtttgcttactggggccagggaacgctggtcaccgtcagctcagcctccaccaagggcccatcggtcttccccctggcaccctcctccaagagcacctctgggggcacagcggccctgggctgcctggtcaaggactacttccccgaaccggtgacggtgtcgtggaactcaggcgccctgaccagcggcgtgcacaccttcccggctgtcctacagtcctcaggactctactccctcagcagcgtggtgaccgtgccctccagcagcttgggcacccagacctacatctgcaacgtgaatcacaagcccagcaacaccaaggtggacaagaaagttgagcccaaatcttgtgacaaaactcacacatgcccaccgtgcccagcacctgaactcctggggggaccgtcagtcttcctcttccccccaaaacccaaggacaccctcatgatctcccggacccctgaggtcacatgcgtggtggtggacgtgagccacgaagaccctgaggtcaagttcaactggtacgtggacggcgtggaggtgcataatgccaagacaaagccgcgggaggagcagtacaacagcacgtaccgtgtggtcagcgtcctcaccgtcctgcaccaggactggctgaatggcaaggagtacaagtgcaaggtcagcaacaaagccctcccagcccccatcgagaaaaccatctccaaagccaaagggcagccccgagaaccacaggtgtacaccctgcccccatcccgggatgagctgaccaagaaccaggtcagcctgacctgcctggtcaaaggcttctatcccagcgacatcgccgtggagtgggagagcaatgggcagccggagaacaactacaagaccacgcctcccgtgctggactccgacggctccttcttcctctacagcaagctcaccgtggacaagagcaggtggcagcaggggaacgtcttctcatgctccgtgatgcatgaggctctgcacaaccactacacgcagaagagcctctccctgtctccgggtaaa

SEQ ID NO: 49 - DNA, 357 bp, Artificial Sequence
  Cetuximab heavy chain S119 variable domain DNA
caggtgcagctgaagcagtcaggacctggcctagtgcagccctcacagagcctgtccatcacctgcacagtctctggtttctcattaactaactatggtgtacactgggttcgccagtctccaggaaagggtctggagtggctgggagtgatatggagtggtggaaacacagactataatacacctttcacatccagactgagcatcaacaaggacaattccaagagccaagttttctttaaaatgaacagtctgcaatctaatgacacagccatatattactgtgccagagccctcacctactatgattacgagtttgcttactggggccagggaacgctggtcaccgtcagctca

SEQ ID NO: 50 - DNA, 642 bp, Artificial Sequence
  Cetuximab Q100 VEIK104-107 EC213-214 light chain DNA
  V_region (1)...(321)
  C_region (322)...(642)
gacatcttgctgactcagtctccagtcatcctgtctgtgagtccaggagaaagagtcagtttctcctgcagggccagtcagagtattggcacaaacatacactggtatcagcaaagaacaaatggttctccaaggcttctcataaagtatgcttctgagtctatctctgggatcccttccaggtttagtggcagtggatcagggacagattttactcttagcatcaacagtgtggagtctgaagatattgcagattattactgtcaacaaaataataactggccaaccacgttcggccaagggaccaaggtggaaatcaaacgtacggtggctgcaccatctgtcttcatcttcccgccatctgatgagcagttgaaatctggaactgcctctgttgtgtgcctgctgaataacttctatcccagagaggccaaagtacagtggaaggtggataacgccctccaatcgggtaactcccaggagagtgtcacagagcaggacagcaaggacagcacctacagcctcagcagcaccctgacgctgagcaaagcagactacgagaaacacaaagtctacgcctgcgaagtcacccatcagggcctgagctcgcccgtcacaaagagcttcaacaggggagagtgt

SEQ ID NO: 51 - DNA, 321 bp, Artificial Sequence
  Cetuximab Q100 VEIK104-107 EC213-214 light chain variable domain DNA
gacatcttgctgactcagtctccagtcatcctgtctgtgagtccaggagaaagagtcagtttctcctgcagggccagtcagagtattggcacaaacatacactggtatcagcaaagaacaaatggttctccaaggcttctcataaagtatgcttctgagtctatctctgggatcccttccaggtttagtggcagtggatcagggacagattttactcttagcatcaacagtgtggagtctgaagatattgcagattattactgtcaacaaaataataactggccaaccacgttcggccaagggaccaaggtggaaatcaaa

SEQ ID NO: 52 - DNA, 1347 bp, Artificial Sequence
  HC-Y104D/Q111P control heavy chain nucleic acid S119
  V_region (1)...(357)
  C_region (358)...(1347)
  variation 312: n = t or c
caggtgcagctgaagcagtcaggacctggcctagtgcagccctcacagagcctgtccatcacctgcacagtctctggtttctcattaactaactatggtgtacactgggttcgccagtctccaggaaagggtctggagtggctgggagtgatatggagtggtggaaacacagactataatacacctttcacatccagactgagcatcaacaaggacaattccaagagccaagttttctttaaaatgaacagtctgcaatctaatgacacagccatatattactgtgccagagccctcacctactatgatgangagtttgcttactggggccctggaacgctggtcaccgtcagctcagcctccaccaagggcccatcggtcttccccctggcaccctcctccaagagcacctctgggggcacagcggccctgggctgcctggtcaaggactacttccccgaaccggtgacggtgtcgtggaactcaggcgccctgaccagcggcgtgcacaccttcccggctgtcctacagtcctcaggactctactccctcagcagcgtggtgaccgtgccctccagcagcttgggcacccagacctacatctgcaacgtgaatcacaagcccagcaacaccaaggtggacaagaaagttgagcccaaatcttgtgacaaaactcacacatgcccaccgtgcccagcacctgaactcctggggggaccgtcagtcttcctcttccccccaaaacccaaggacaccctcatgatctcccggacccctgaggtcacatgcgtggtggtggacgtgagccacgaagaccctgaggtcaagttcaactggtacgtggacggcgtggaggtgcataatgccaagacaaagccgcgggaggagcagtacaacagcacgtaccgtgtggtcagcgtcctcaccgtcctgcaccaggactggctgaatggcaaggagtacaagtgcaaggtcagcaacaaagccctcccagcccccatcgagaaaaccatctccaaagccaaagggcagccccgagaaccacaggtgtacaccctgcccccatcccgggatgagctgaccaagaaccaggtcagcctgacctgcctggtcaaaggcttctatcccagcgacatcgccgtggagtgggagagcaatgggcagccggagaacaactacaagaccacgcctcccgtgctggactccgacggctccttcttcctctacagcaagctcaccgtggacaagagcaggtggcagcaggggaacgtcttctcatgctccgtgatgcatgaggctctgcacaaccactacacgcagaagagcctctccctgtctccgggtaaa

SEQ ID NO: 53 - protein, 449 aa, Artificial Sequence
  HC-Y104D/Q111P control heavy chain amino acid S119
  DOMAIN (1)...(119): variable domain
  DOMAIN (120)...(217): CH1
  DOMAIN (218)...(232): hinge region
  DOMAIN (233)...(342): CH2
  DOMAIN (343)...(449): CH3
QVQLKQSGPGLVQPSQSLSITCTVSGFSLTNYGVHWVRQSPGKGLEWLGVIWSGGNTDYNTPFTSRLSINKDNSKSQVFFKMNSLQSNDTAIYYCARALTYYDDEFAYWGPGTLVTVSSASTKGPSVFPLAPSSKSTSGGTAALGCLVKDYFPEPVTVSWNSGALTSGVHTFPAVLQSSGLYSLSSVVTVPSSSLGTQTYICNVNHKPSNTKVDKKVEPKSCDKTHTCPPCPAPELLGGPSVFLFPPKPKDTLMISRTPEVTCVVVDVSHEDPEVKFNWYVDGVEVHNAKTKPREEQYNSTYRVVSVLTVLHQDWLNGKEYKCKVSNKALPAPIEKTISKAKGQPREPQVYTLPPSRDELTKNQVSLTCLVKGFYPSDIAVEWESNGQPENNYKTTPPVLDSDGSFFLYSKLTVDKSRWQQGNVFSCSVMHEALHNHYTQKSLSLSPGK

SEQ ID NO: 54 - DNA, 1347 bp, Artificial Sequence
  DP-h3, 7 heavy chain nucleic acid S119
  V_region (1)...(357)
  C_region (358)...(1347)
gaggtccagctggtacagtctggggctgaggtgaagaagcctggggctacagtgaaaatctcctgcaaggtttctggtttctcattaactaactatggtgtacactgggtgcgacaggccactggacaagggcttgagtggatgggtgtgatatggagtggtggaaacacagactataatacacctttcacatccagattcaccatctccagagatgattcaaagaacacggcgtatctgcaaatgaacagcctgaaaaccgaggacacggccgtgtattactgtgccagagccctcacctactatgatgatgagtttgcttactggggccctggaacgctggtcaccgtcagctcagcctccaccaagggcccatcggtcttccccctggcaccctcctccaagagcacctctgggggcacagcggccctgggctgcctggtcaaggactacttccccgaaccggtgacggtgtcgtggaactcaggcgccctgaccagcggcgtgcacaccttcccggctgtcctacagtcctcaggactctactccctcagcagcgtggtgaccgtgccctccagcagcttgggcacccagacctacatctgcaacgtgaatcacaagcccagcaacaccaaggtggacaagaaagttgagcccaaatcttgtgacaaaactcacacatgcccaccgtgcccagcacctgaactcctggggggaccgtcagtcttcctcttccccccaaaacccaaggacaccctcatgatctcccggacccctgaggtcacatgcgtggtggtggacgtgagccacgaagaccctgaggtcaagttcaactggtacgtggacggcgtggaggtgcataatgccaagacaaagccgcgggaggagcagtacaacagcacgtaccgtgtggtcagcgtcctcaccgtcctgcaccaggactggctgaatggcaaggagtacaagtgcaaggtcagcaacaaagccctcccagcccccatcgagaaaaccatctccaaagccaaagggcagccccgagaaccacaggtgtacaccctgcccccatcccgggatgagctgaccaagaaccaggtcagcctgacctgcctggtcaaaggcttctatcccagcgacatcgccgtggagtgggagagcaatgggcagccggagaacaactacaagaccacgcctcccgtgctggactccgacggctccttcttcctctacagcaagctcaccgtggacaagagcaggtggcagcaggggaacgtcttctcatgctccgtgatgcatgaggctctgcacaaccactacacgcagaagagcctctccctgtctccgggtaaa

SEQ ID NO: 55 - protein, 449 aa, Artificial Sequence
  DP-h3, 7 heavy chain amino acid S119
  DOMAIN (1)...(119): variable domain
  DOMAIN (120)...(217): CH1
  DOMAIN (218)...(232): hinge region
  DOMAIN (233)...(342): CH2
  DOMAIN (343)...(449): CH3
EVQLVQSGAEVKKPGATVKISCKVSGFSLTNYGVHWVRQATGQGLEWMGVIWSGGNTDYNTPFTSRFTISRDDSKNTAYLQMNSLKTEDTAVYYCARALTYYDDEFAYWGPGTLVTVSSASTKGPSVFPLAPSSKSTSGGTAALGCLVKDYFPEPVTVSWNSGALTSGVHTFPAVLQSSGLYSLSSVVTVPSSSLGTQTYICNVNHKPSNTKVDKKVEPKSCDKTHTCPPCPAPELLGGPSVFLFPPKPKDTLMISRTPEVTCVVVDVSHEDPEVKFNWYVDGVEVHNAKTKPREEQYNSTYRVVSVLTVLHQDWLNGKEYKCKVSNKALPAPIEKTISKAKGQPREPQVYTLPPSRDELTKNQVSLTCLVKGFYPSDIAVEWESNGQPENNYKTTPPVLDSDGSFFLYSKLTVDKSRWQQGNVFSCSVMHEALHNHYTQKSLSLSPGK

SEQ ID NO: 56 - DNA, 1347 bp, Artificial Sequence
  D-h3, 7 heavy chain nucleic acid S119
  V_region (1)...(357)
  C_region (358)...(1347)
  variation 312: n = t or c
gaggtccagctggtacagtctggggctgaggtgaagaagcctggggctacagtgaaaatctcctgcaaggtttctggtttctcattaactaactatggtgtacactgggtgcgacaggccactggacaagggcttgagtggatgggtgtgatatggagtggtggaaacacagactataatacacctttcacatccagattcaccatctccagagatgattcaaagaacacggcgtatctgcaaatgaacagcctgaaaaccgaggacacggccgtgtattactgtgccagagccctcacctactatgatgangagtttgcttactggggccagggaacgctggtcaccgtcagctcagcctccaccaagggcccatcggtcttccccctggcaccctcctccaagagcacctctgggggcacagcggccctgggctgcctggtcaaggactacttccccgaaccggtgacggtgtcgtggaactcaggcgccctgaccagcggcgtgcacaccttcccggctgtcctacagtcctcaggactctactccctcagcagcgtggtgaccgtgccctccagcagcttgggcacccagacctacatctgcaacgtgaatcacaagcccagcaacaccaaggtggacaagaaagttgagcccaaatcttgtgacaaaactcacacatgcccaccgtgcccagcacctgaactcctggggggaccgtcagtcttcctcttccccccaaaacccaaggacaccctcatgatctcccggacccctgaggtcacatgcgtggtggtggacgtgagccacgaagaccctgaggtcaagttcaactggtacgtggacggcgtggaggtgcataatgccaagacaaagccgcgggaggagcagtacaacagcacgtaccgtgtggtcagcgtcctcaccgtcctgcaccaggactggctgaatggcaaggagtacaagtgcaaggtcagcaacaaagccctcccagcccccatcgagaaaaccatctccaaagccaaagggcagccccgagaaccacaggtgtacaccctgcccccatcccgggatgagctgaccaagaaccaggtcagcctgacctgcctggtcaaaggcttctatcccagcgacatcgccgtggagtgggagagcaatgggcagccggagaacaactacaagaccacgcctcccgtgctggactccgacggctccttcttcctctacagcaagctcaccgtggacaagagcaggtggcagcaggggaacgtcttctcatgctccgtgatgcatgaggctctgcacaaccactacacgcagaagagcctctccctgtctccgggtaaa

SEQ ID NO: 57 - protein, 449 aa, Artificial Sequence
  D-h3, 7 heavy chain amino acid S119
  DOMAIN (1)...(119): variable domain
  DOMAIN (120)...(217): CH1
  DOMAIN (218)...(232): hinge region
  DOMAIN (233)...(342): CH2
  DOMAIN (343)...(449): CH3
EVQLVQSGAEVKKPGATVKISCKVSGFSLTNYGVHWVRQATGQGLEWMGVIWSGGNTDYNTPFTSRFTISRDDSKNTAYLQMNSLKTEDTAVYYCARALTYYDDEFAYWGQGTLVTVSSASTKGPSVFPLAPSSKSTSGGTAALGCLVKDYFPEPVTVSWNSGALTSGVHTFPAVLQSSGLYSLSSVVTVPSSSLGTQTYICNVNHKPSNTKVDKKVEPKSCDKTHTCPPCPAPELLGGPSVFLFPPKPKDTLMISRTPEVTCVVVDVSHEDPEVKFNWYVDGVEVHNAKTKPREEQYNSTYRVVSVLTVLHQDWLNGKEYKCKVSNKALPAPIEKTISKAKGQPREPQVYTLPPSRDELTKNQVSLTCLVKGFYPSDIAVEWESNGQPENNYKTTPPVLDSDGSFFLYSKLTVDKSRWQQGNVFSCSVMHEALHNHYTQKSLSLSPGK

SEQ ID NO: 58 - DNA, 1347 bp, Artificial Sequence; identical to SEQ ID NO: 56
  E-h3, 7 heavy chain nucleic acid S119
  V_region (1)...(357)
  C_region (358)...(1347)
  variation 312: n = a or g

SEQ ID NO: 59 - protein, 449 aa, Artificial Sequence
  E-h3, 7 heavy chain amino acid S119
  DOMAIN (1)...(119): variable domain
  DOMAIN (120)...(217): CH1
  DOMAIN (218)...(232): hinge region
  DOMAIN (233)...(342): CH2
  DOMAIN (343)...(449): CH3
EVQLVQSGAEVKKPGATVKISCKVSGFSLTNYGVHWVRQATGQGLEWMGVIWSGGNTDYNTPFTSRFTISRDDSKNTAYLQMNSLKTEDTAVYYCARALTYYDEEFAYWGQGTLVTVSSASTKGPSVFPLAPSSKSTSGGTAALGCLVKDYFPEPVTVSWNSGALTSGVHTFPAVLQSSGLYSLSSVVTVPSSSLGTQTYICNVNHKPSNTKVDKKVEPKSCDKTHTCPPCPAPELLGGPSVFLFPPKPKDTLMISRTPEVTCVVVDVSHEDPEVKFNWYVDGVEVHNAKTKPREEQYNSTYRVVSVLTVLHQDWLNGKEYKCKVSNKALPAPIEKTISKAKGQPREPQVYTLPPSRDELTKNQVSLTCLVKGFYPSDIAVEWESNGQPENNYKTTPPVLDSDGSFFLYSKLTVDKSRWQQGNVFSCSVMHEALHNHYTQKSLSLSPGK

SEQ ID NO: 60 - DNA, 357 bp, Artificial Sequence
  E-h3, 7 heavy chain variable domain nucleic acid S119
  variation 312: n = a or g
gaggtccagctggtacagtctggggctgaggtgaagaagcctggggctacagtgaaaatctcctgcaaggtttctggtttctcattaactaactatggtgtacactgggtgcgacaggccactggacaagggcttgagtggatgggtgtgatatggagtggtggaaacacagactataatacacctttcacatccagattcaccatctccagagatgattcaaagaacacggcgtatctgcaaatgaacagcctgaaaaccgaggacacggccgtgtattactgtgccagagccctcacctactatgatgangagtttgcttactggggccagggaacgctggtcaccgtcagctca

SEQ ID NO: 61 - protein, 119 aa, Artificial Sequence
  E-h3, 7 heavy chain variable domain amino acid S119
EVQLVQSGAEVKKPGATVKISCKVSGFSLTNYGVHWVRQATGQGLEWMGVIWSGGNTDYNTPFTSRFTISRDDSKNTAYLQMNSLKTEDTAVYYCARALTYYDEEFAYWGQGTLVTVSS

SEQ ID NO: 62 - DNA, 357 bp, Artificial Sequence
  E-h3, 7 heavy chain variable domain nucleic acid A119
  variation 312: n = a or g
gaggtccagctggtacagtctggggctgaggtgaagaagcctggggctacagtgaaaatctcctgcaaggtttctggtttctcattaactaactatggtgtacactgggtgcgacaggccactggacaagggcttgagtggatgggtgtgatatggagtggtggaaacacagactataatacacctttcacatccagattcaccatctccagagatgattcaaagaacacggcgtatctgcaaatgaacagcctgaaaaccgaggacacggccgtgtattactgtgccagagccctcacctactatgatgangagtttgcttactggggccagggaacgctggtcaccgtcagcgca

SEQ ID NO: 63 - protein, 119 aa, Artificial Sequence
  E-h3, 7 heavy chain variable domain amino acid A119
EVQLVQSGAEVKKPGATVKISCKVSGFSLTNYGVHWVRQATGQGLEWMGVIWSGGNTDYNTPFTSRFTISRDDSKNTAYLQMNSLKTEDTAVYYCARALTYYDEEFAYWGQGTLVTVSA

SEQ ID NO: 64 - DNA, 1347 bp, Artificial Sequence
  FDP-h3, 7, 11, 15 heavy chain nucleic acid S119
  V_region (1)...(357)
  C_region (358)...(1347)
gaggtccagctggtacagtctggggctgaggtgaagaagcctggggctacagtgaaaatctcctgcaaggtttctggtttctcattatttaactatggtgtacactgggtgcgacaggccactggacaagggcttgagtggatgggtgtgatatggagtggtggaaacacagactataatacacctttcacatccagattcaccatctccagagatgattcaaagaacacggcgtatctgcaaatgaacagcctgaaaaccgaggacacggccgtgtattactgtgccagagccctcacctactatgatgatgagtttgcttactggggccctggaacgctggtcaccgtcagctcagcctccaccaagggcccatcggtcttccccctggcaccctcctccaagagcacctctgggggcacagcggccctgggctgcctggtcaaggactacttccccgaaccggtgacggtgtcgtggaactcaggcgccctgaccagcggcgtgcacaccttcccggctgtcctacagtcctcaggactctactccctcagcagcgtggtgaccgtgccctccagcagcttgggcacccagacctacatctgcaacgtgaatcacaagcccagcaacaccaaggtggacaagaaagttgagcccaaatcttgtgacaaaactcacacatgcccaccgtgcccagcacctgaactcctggggggaccgtcagtcttcctcttccccccaaaacccaaggacaccctcatgatctcccggacccctgaggtcacatgcgtggtggtggacgtgagccacgaagaccctgaggtcaagttcaactggtacgtggacggcgtggaggtgcataatgccaagacaaagccgcgggaggagcagtacaacagcacgtaccgtgtggtcagcgtcctcaccgtcctgcaccaggactggctgaatggcaaggagtacaagtgcaaggtcagcaacaaagccctcccagcccccatcgagaaaaccatctccaaagccaaagggcagccccgagaaccacaggtgtacaccctgcccccatcccgggatgagctgaccaagaaccaggtcagcctgacctgcctggtcaaaggcttctatcccagcgacatcgccgtggagtgggagagcaatgggcagccggagaacaactacaagaccacgcctcccgtgctggactccgacggctccttcttcctctacagcaagctcaccgtggacaagagcaggtggcagcaggggaacgtcttctcatgctccgtgatgcatgaggctctgcacaaccactacacgcagaagagcctctccctgtctccgggtaaa

SEQ ID NO: 65 - protein, 449 aa, Artificial Sequence
  FDP-h3, 7, 11, 15 heavy chain amino acid S119
  DOMAIN (1)...(119): variable domain
  DOMAIN (120)...(217): CH1
  DOMAIN (218)...(232): hinge region
  DOMAIN (233)...(342): CH2
  DOMAIN (343)...(447): CH3
EVQLVQSGAEVKKPGATVKISCKVSGFSLFNYGVHWVRQATGQGLEWMGVIWSGGNTDYNTPFTSRFTISRDDSKNTAYLQMNSLKTEDTAVYYCARALTYYDDEFAYWGPGTLVTVSSASTKGPSVFPLAPSSKSTSGGTAALGCLVKDYFPEPVTVSWNSGALTSGVHTFPAVLQSSGLYSLSSVVTVPSSSLGTQTYICNVNHKPSNTKVDKKVEPKSCDKTHTCPPCPAPELLGGPSVFLFPPKPKDTLMISRTPEVTCVVVDVSHEDPEVKFNWYVDGVEVHNAKTKPREEQYNSTYRVVSVLTVLHQDWLNGKEYKCKVSNKALPAPIEKTISKAKGQPREPQVYTLPPSRDELTKNQVSLTCLVKGFYPSDIAVEWESNGQPENNYKTTPPVLDSDGSFFLYSKLTVDKSRWQQGNVFSCSVMHEALHNHYTQKSLSLSPGK

SEQ ID NO: 66 - DNA, 1347 bp, Artificial Sequence
  HC-Y104D control heavy chain nucleic acid S119
  V_region (1)...(357)
  C_region (358)...(1347)
  variation 312: n = t or c
caggtgcagctgaagcagtcaggacctggcctagtgcagccctcacagagcctgtccatcacctgcacagtctctggtttctcattaactaactatggtgtacactgggttcgccagtctccaggaaagggtctggagtggctgggagtgatatggagtggtggaaacacagactataatacacctttcacatccagactgagcatcaacaaggacaattccaagagccaagttttctttaaaatgaacagtctgcaatctaatgacacagccatatattactgtgccagagccctcacctactatgatgangagtttgcttactggggccagggaacgctggtcaccgtcagctcagcctccaccaagggcccatcggtcttccccctggcaccctcctccaagagcacctctgggggcacagcggccctgggctgcctggtcaaggactacttccccgaaccggtgacggtgtcgtggaactcaggcgccctgaccagcggcgtgcacaccttcccggctgtcctacagtcctcaggactctactccctcagcagcgtggtgaccgtgccctccagcagcttgggcacccagacctacatctgcaacgtgaatcacaagcccagcaacaccaaggtggacaagaaagttgagcccaaatcttgtgacaaaactcacacatgcccaccgtgcccagcacctgaactcctggggggaccgtcagtcttcctcttccccccaaaacccaaggacaccctcatgatctcccggacccctgaggtcacatgcgtggtggtggacgtgagccacgaagaccctgaggtcaagttcaactggtacgtggacggcgtggaggtgcataatgccaagacaaagccgcgggaggagcagtacaacagcacgtaccgtgtggtcagcgtcctcaccgtcctgcaccaggactggctgaatggcaaggagtacaagtgcaaggtcagcaacaaagccctcccagcccccatcgagaaaaccatctccaaagccaaagggcagccccgagaaccacaggtgtacaccctgcccccatcccgggatgagctgaccaagaaccaggtcagcctgacctgcctggtcaaaggcttctatcccagcgacatcgccgtggagtgggagagcaatgggcagccggagaacaactacaagaccacgcctcccgtgctggactccgacggctccttcttcctctacagcaagctcaccgtggacaagagcaggtggcagcaggggaacgtcttctcatgctccgtgatgcatgaggctctgcacaaccactacacgcagaagagcctctccctgtctccgggtaaa

SEQ ID NO: 67 - protein, 449 aa, Artificial Sequence
  HC-Y104D control heavy chain amino acid S119
  DOMAIN (1)...(119): variable domain
  DOMAIN (120)...(217): CH1
  DOMAIN (218)...(232): hinge region
  DOMAIN (233)...(342): CH2
  DOMAIN (343)...(449): CH3
QVQLKQSGPGLVQPSQSLSITCTVSGFSLTNYGVHWVRQSPGKGLEWLGVIWSGGNTDYNTPFTSRLSINKDNSKSQVFFKMNSLQSNDTAIYYCARALTYYDDEFAYWGQGTLVTVSSASTKGPSVFPLAPSSKSTSGGTAALGCLVKDYFPEPVTVSWNSGALTSGVHTFPAVLQSSGLYSLSSVVTVPSSSLGTQTYICNVNHKPSNTKVDKKVEPKSCDKTHTCPPCPAPELLGGPSVFLFPPKPKDTLMISRTPEVTCVVVDVSHEDPEVKFNWYVDGVEVHNAKTKPREEQYNSTYRVVSVLTVLHQDWLNGKEYKCKVSNKALPAPIEKTISKAKGQPREPQVYTLPPSRDELTKNQVSLTCLVKGFYPSDIAVEWESNGQPENNYKTTPPVLDSDGSFFLYSKLTVDKSRWQQGNVFSCSVMHEALHNHYTQKSLSLSPGK

SEQ ID NO: 68 - DNA, 357 bp, Artificial Sequence
  HC-Y104D control heavy chain variable domain nucleic acid S119
  variation 312: n = t or c
caggtgcagctgaagcagtcaggacctggcctagtgcagccctcacagagcctgtccatcacctgcacagtctctggtttctcattaactaactatggtgtacactgggttcgccagtctccaggaaagggtctggagtggctgggagtgatatggagtggtggaaacacagactataatacacctttcacatccagactgagcatcaacaaggacaattccaagagccaagttttctttaaaatgaacagtctgcaatctaatgacacagccatatattactgtgccagagccctcacctactatgatgangagtttgcttactggggccagggaacgctggtcaccgtcagctca

SEQ ID NO: 69 - protein, 119 aa, Artificial Sequence
  HC-Y104D control heavy chain variable domain amino acid S119
QVQLKQSGPGLVQPSQSLSITCTVSGFSLTNYGVHWVRQSPGKGLEWLGVIWSGGNTDYNTPFTSRLSINKDNSKSQVFFKMNSLQSNDTAIYYCARALTYYDDEFAYWGQGTLVTVSS

SEQ ID NO: 70 - protein, 119 aa, Artificial Sequence
  HC-Y104D control heavy chain variable domain amino acid A119
QVQLKQSGPGLVQPSQSLSITCTVSGFSLTNYGVHWVRQSPGKGLEWLGVIWSGGNTDYNTPFTSRLSINKDNSKSQVFFKMNSLQSNDTAIYYCARALTYYDDEFAYWGQGTLVTVSA

SEQ ID NO: 71 - DNA, 1347 bp, Artificial Sequence; identical to SEQ ID NO: 66
  HC-Y104E heavy chain nucleic acid S119
  V_region (1)...(357)
  C_region (358)...(1347)
  variation 312: n = a or g

SEQ ID NO: 72 - protein, 449 aa, Artificial Sequence
  HC-Y104E heavy chain amino acid S119
  DOMAIN (1)...(119): variable domain
  DOMAIN (120)...(217): CH1
  DOMAIN (218)...(232): hinge region
  DOMAIN (233)...(342): CH2
  DOMAIN (343)...(449): CH3
QVQLKQSGPGLVQPSQSLSITCTVSGFSLTNYGVHWVRQSPGKGLEWLGVIWSGGNTDYNTPFTSRLSINKDNSKSQVFFKMNSLQSNDTAIYYCARALTYYDEEFAYWGQGTLVTVSSASTKGPSVFPLAPSSKSTSGGTAALGCLVKDYFPEPVTVSWNSGALTSGVHTFPAVLQSSGLYSLSSVVTVPSSSLGTQTYICNVNHKPSNTKVDKKVEPKSCDKTHTCPPCPAPELLGGPSVFLFPPKPKDTLMISRTPEVTCVVVDVSHEDPEVKFNWYVDGVEVHNAKTKPREEQYNSTYRVVSVLTVLHQDWLNGKEYKCKVSNKALPAPIEKTISKAKGQPREPQVYTLPPSRDELTKNQVSLTCLVKGFYPSDIAVEWESNGQPENNYKTTPPVLDSDGSFFLYSKLTVDKSRWQQGNVFSCSVMHEALHNHYTQKSLSLSPGK

SEQ ID NO: 73 - DNA, 357 bp, Artificial Sequence; identical to SEQ ID NO: 68
  HC-Y104E heavy chain variable domain nucleic acid S119
  variation 312: n = a or g

SEQ ID NO: 74 - protein, 119 aa, Artificial Sequence
  HC-Y104E heavy chain variable domain amino acid S119
QVQLKQSGPGLVQPSQSLSITCTVSGFSLTNYGVHWVRQSPGKGLEWLGVIWSGGNTDYNTPFTSRLSINKDNSKSQVFFKMNSLQSNDTAIYYCARALTYYDEEFAYWGQGTLVTVSS

SEQ ID NO: 75 - protein, 119 aa, Artificial Sequence
  HC-Y104E heavy chain variable domain amino acid A119
QVQLKQSGPGLVQPSQSLSITCTVSGFSLTNYGVHWVRQSPGKGLEWLGVIWSGGNTDYNTPFTSRLSINKDNSKSQVFFKMNSLQSNDTAIYYCARALTYYDEEFAYWGQGTLVTVSA

SEQ ID NO: 76 - protein, 449 aa, Artificial Sequence
  HC-Y104E/HC-Q111P heavy chain amino acid S119
  DOMAIN (1)...(119): variable domain
  DOMAIN (120)...(217): CH1
  DOMAIN (218)...(232): hinge region
  DOMAIN (233)...(342): CH2
  DOMAIN (343)...(449): CH3
QVQLKQSGPGLVQPSQSLSITCTVSGFSLTNYGVHWVRQSPGKGLEWLGVIWSGGNTDYNTPFTSRLSINKDNSKSQVFFKMNSLQSNDTAIYYCARALTYYDEEFAYWGPGTLVTVSSASTKGPSVFPLAPSSKSTSGGTAALGCLVKDYFPEPVTVSWNSGALTSGVHTFPAVLQSSGLYSLSSVVTVPSSSLGTQTYICNVNHKPSNTKVDKKVEPKSCDKTHTCPPCPAPELLGGPSVFLFPPKPKDTLMISRTPEVTCVVVDVSHEDPEVKFNWYVDGVEVHNAKTKPREEQYNSTYRVVSVLTVLHQDWLNGKEYKCKVSNKALPAPIEKTISKAKGQPREPQVYTLPPSRDELTKNQVSLTCLVKGFYPSDIAVEWESNGQPENNYKTTPPVLDSDGSFFLYSKLTVDKSRWQQGNVFSCSVMHEALHNHYTQKSLSLSPGK

SEQ ID NO: 77 - protein, 119 aa, Artificial Sequence
  HC-Y104E/HC-Q111P heavy chain variable domain amino acid S119
QVQLKQSGPGLVQPSQSLSITCTVSGFSLTNYGVHWVRQSPGKGLEWLGVIWSGGNTDYNTPFTSRLSINKDNSKSQVFFKMNSLQSNDTAIYYCARALTYYDEEFAYWGPGTLVTVSS

SEQ ID NO: 78 - protein, 119 aa, Artificial Sequence
  HC-Y104E/HC-Q111P heavy chain variable domain amino acid A119
QVQLKQSGPGLVQPSQSLSITCTVSGFSLTNYGVHWVRQSPGKGLEWLGVIWSGGNTDYNTPFTSRLSINKDNSKSQVFFKMNSLQSNDTAIYYCARALTYYDEEFAYWGPGTLVTVSA

SEQ ID NO: 79 - protein, 449 aa, Artificial Sequence
  HC-S25C/HC-Y104E heavy chain amino acid S119
  DOMAIN (1)...(119): variable domain
  DOMAIN (120)...(217): CH1
  DOMAIN (218)...(232): hinge region
  DOMAIN (233)...(342): CH2
  DOMAIN (343)...(449): CH3
QVQLKQSGPGLVQPSQSLSITCTVCGFSLTNYGVHWVRQSPGKGLEWLGVIWSGGNTDYNTPFTSRLSINKDNSKSQVFFKMNSLQSNDTAIYYCARALTYYDEEFAYWGQGTLVTVSSASTKGPSVFPLAPSSKSTSGGTAALGCLVKDYFPEPVTVSWNSGALTSGVHTFPAVLQSSGLYSLSSVVTVPSSSLGTQTYICNVNHKPSNTKVDKKVEPKSCDKTHTCPPCPAPELLGGPSVFLFPPKPKDTLMISRTPEVTCVVVDVSHEDPEVKFNWYVDGVEVHNAKTKPREEQYNSTYRVVSVLTVLHQDWLNGKEYKCKVSNKALPAPIEKTISKAKGQPREPQVYTLPPSRDELTKNQVSLTCLVKGFYPSDIAVEWESNGQPENNYKTTPPVLDSDGSFFLYSKLTVDKSRWQQGNVFSCSVMHEALHNHYTQKSLSLSPGK

SEQ ID NO: 80 - protein, 119 aa, Artificial Sequence
  HC-S25C/HC-Y104E heavy chain variable domain amino acid S119
QVQLKQSGPGLVQPSQSLSITCTVCGFSLTNYGVHWVRQSPGKGLEWLGVIWSGGNTDYNTPFTSRLSINKDNSKSQVFFKMNSLQSNDTAIYYCARALTYYDEEFAYWGQGTLVTVSS

SEQ ID NO: 81 - protein, 119 aa, Artificial Sequence
  HC-S25C/HC-Y104E heavy chain variable domain amino acid A119
QVQLKQSGPGLVQPSQSLSITCTVCGFSLTNYGVHWVRQSPGKGLEWLGVIWSGGNTDYNTPFTSRLSINKDNSKSQVFFKMNSLQSNDTAIYYCARALTYYDEEFAYWGQGTLVTVSA

SEQ ID NO: 82 - protein, 449 aa, Artificial Sequence
  HC-S53G/HC-Y104E heavy chain amino acid S119
  DOMAIN (1)...(119): variable domain
  DOMAIN (120)...(217): CH1
  DOMAIN (218)...(232): hinge region
  DOMAIN (233)...(342): CH2
  DOMAIN (343)...(449): CH3
QVQLKQSGPGLVQPSQSLSITCTVSGFSLTNYGVHWVRQSPGKGLEWLGVIWGGGNTDYNTPFTSRLSINKDNSKSQVFFKMNSLQSNDTAIYYCARALTYYDEEFAYWGQGTLVTVSSASTKGPSVFPLAPSSKSTSGGTAALGCLVKDYFPEPVTVSWNSGALTSGVHTFPAVLQSSGLYSLSSVVTVPSSSLGTQTYICNVNHKPSNTKVDKKVEPKSCDKTHTCPPCPAPELLGGPSVFLFPPKPKDTLMISRTPEVTCVVVDVSHEDPEVKFNWYVDGVEVHNAKTKPREEQYNSTYRVVSVLTVLHQDWLNGKEYKCKVSNKALPAPIEKTISKAKGQPREPQVYTLPPSRDELTKNQVSLTCLVKGFYPSDIAVEWESNGQPENNYKTTPPVLDSDGSFFLYSKLTVDKSRWQQGNVFSCSVMHEALHNHYTQKSLSLSPGK

SEQ ID NO: 83 - protein, 119 aa, Artificial Sequence
  HC-S53G/HC-Y104E heavy chain variable domain amino acid S119
QVQLKQSGPGLVQPSQSLSITCTVSGFSLTNYGVHWVRQSPGKGLEWLGVIWGGGNTDYNTPFTSRLSINKDNSKSQVFFKMNSLQSNDTAIYYCARALTYYDEEFAYWGQGTLVTVSS

SEQ ID NO: 84 - protein, 119 aa, Artificial Sequence
  HC-S53G/HC-Y104E heavy chain variable domain amino acid A119
QVQLKQSGPGLVQPSQSLSITCTVSGFSLTNYGVHWVRQSPGKGLEWLGVIWGGGNTDYNTPFTSRLSINKDNSKSQVFFKMNSLQSNDTAIYYCARALTYYDEEFAYWGQGTLVTVSA

SEQ ID NO: 85 - protein, 449 aa, Artificial Sequence
  HC-S53G/HC-Y104E/HC-Q111P heavy chain amino acid S119
  DOMAIN (1)...(119): variant domain
  DOMAIN (120)...(217): CH1
  DOMAIN (218)...(232): hinge region
  DOMAIN (233)...(342): CH2
  DOMAIN (343)...(449): CH3
QVQLKQSGPGLVQPSQSLSITCTVSGFSLTNYGVHWVRQSPGKGLEWLGVIWGGGNTDYNTPFTSRLSINKDNSKSQVFFKMNSLQSNDTAIYYCARALTYYDEEFAYWGPGTLVTVSSASTKGPSVFPLAPSSKSTSGGTAALGCLVKDYFPEPVTVSWNSGALTSGVHTFPAVLQSSGLYSLSSVVTVPSSSLGTQTYICNVNHKPSNTKVDKKVEPKSCDKTHTCPPCPAPELLGGPSVFLFPPKPKDTLMISRTPEVTCVVVDVSHEDPEVKFNWYVDGVEVHNAKTKPREEQYNSTYRVVSVLTVLHQDWLNGKEYKCKVSNKALPAPIEKTISKAKGQPREPQVYTLPPSRDELTKNQVSLTCLVKGFYPSDIAVEWESNGQPENNYKTTPPVLDSDGSFFLYSKLTVDKSRWQQGNVFSCSVMHEALHNHYTQKSLSLSPGK

SEQ ID NO: 86 - protein, 119 aa, Artificial Sequence
  HC-S53G/HC-Y104E/HC-Q111P heavy chain variable domain amino acid S119
QVQLKQSGPGLVQPSQSLSITCTVSGFSLTNYGVHWVRQSPGKGLEWLGVIWGGGNTDYNTPFTSRLSINKDNSKSQVFFKMNSLQSNDTAIYYCARALTYYDEEFAYWGPGTLVTVSS

SEQ ID NO: 87 - protein, 119 aa, Artificial Sequence
  HC-S53G/HC-Y104E/HC-Q111P heavy chain variable domain amino acid A119
QVQLKQSGPGLVQPSQSLSITCTVSGFSLTNYGVHWVRQSPGKGLEWLGVIWGGGNTDYNTPFTSRLSINKDNSKSQVFFKMNSLQSNDTAIYYCARALTYYDEEFAYWGPGTLVTVSA

SEQ ID NO: 88 - protein, 449 aa, Artificial Sequence
  HC-S25V/HC-Y104E heavy chain amino acid S119
  DOMAIN (1)...(119): variable domain
  DOMAIN (120)...(217): CH1
  DOMAIN (218)...(232): hinge region
  DOMAIN (233)...(342): CH2
  DOMAIN (343)...(449): CH3
QVQLKQSGPGLVQPSQSLSITCTVVGFSLTNYGVHWVRQSPGKGLEWLGVIWSGGNTDYNTPFTSRLSINKDNSKSQVFFKMNSLQSNDTAIYYCARALTYYDEEFAYWGQGTLVTVSSASTKGPSVFPLAPSSKSTSGGTAALGCLVKDYFPEPVTVSWNSGALTSGVHTFPAVLQSSGLYSLSSVVTVPSSSLGTQTYICNVNHKPSNTKVDKKVEPKSCDKTHTCPPCPAPELLGGPSVFLFPPKPKDTLMISRTPEVTCVVVDVSHEDPEVKFNWYVDGVEVHNAKTKPREEQYNSTYRVVSVLTVLHQDWLNGKEYKCKVSNKALPAPIEKTISKAKGQPREPQVYTLPPSRDELTKNQVSLTCLVKGFYPSDIAVEWESNGQPENNYKTTPPVLDSDGSFFLYSKLTVDKSRWQQGNVFSCSVMHEALHNHYTQKSLSLSPGK

SEQ ID NO: 89 - protein, 119 aa, Artificial Sequence
  HC-S25V/HC-Y104E heavy chain variable domain amino acid S119
QVQLKQSGPGLVQPSQSLSITCTVVGFSLTNYGVHWVRQSPGKGLEWLGVIWSGGNTDYNTPFTSRLSINKDNSKSQVFFKMNSLQSNDTAIYYCARALTYYDEEFAYWGQGTLVTVSS

SEQ ID NO: 90 - protein, 119 aa, Artificial Sequence
  HC-S25V/HC-Y104E heavy chain variable domain amino acid A119
QVQLKQSGPGLVQPSQSLSITCTVVGFSLTNYGVHWVRQSPGKGLEWLGVIWSGGNTDYNTPFTSRLSINKDNSKSQVFFKMNSLQSNDTAIYYCARALTYYDEEFAYWGQGTLVTVSA

SEQ ID NO: 91 - protein, 449 aa, Artificial Sequence
  HC-S25V/HC-Y104E/HC-Q111P heavy chain amino acid S119
  DOMAIN (1)...(119): variable domain
  DOMAIN (120)...(217): CH1
  DOMAIN (218)...(232): hinge region
  DOMAIN (233)...(342): CH2
  DOMAIN (343)...(449): CH3
QVQLKQSGPGLVQPSQSLSITCTVVGFSLTNYGVHWVRQSPGKGLEWLGVIWSGGNTDYNTPFTSRLSINKDNSKSQVFFKMNSLQSNDTAIYYCARALTYYDEEFAYWGPGTLVTVSSASTKGPSVFPLAPSSKSTSGGTAALGCLVKDYFPEPVTVSWNSGALTSGVHTFPAVLQSSGLYSLSSVVTVPSSSLGTQTYICNVNHKPSNTKVDKKVEPKSCDKTHTCPPCPAPELLGGPSVFLFPPKPKDTLMISRTPEVTCVVVDVSHEDPEVKFNWYVDGVEVHNAKTKPREEQYNSTYRVVSVLTVLHQDWLNGKEYKCKVSNKALPAPIEKTISKAKGQPREPQVYTLPPSRDELTKNQVSLTCLVKGFYPSDIAVEWESNGQPENNYKTTPPVLDSDGSFFLYSKLTVDKSRWQQGNVFSCSVMHEALHNHYTQKSLSLSPGK

SEQ ID NO: 92 - protein, 119 aa, Artificial Sequence
  HC-S25V/HC-Y104E/HC-Q111P heavy chain variable domain amino acid S119
QVQLKQSGPGLVQPSQSLSITCTVVGFSLTNYGVHWVRQSPGKGLEWLGVIWSGGNTDYNTPFTSRLSINKDNSKSQVFFKMNSLQSNDTAIYYCARALTYYDEEFAYWGPGTLVTVSS

SEQ ID NO: 93 - protein, 119 aa, Artificial Sequence
  HC-S25V/HC-Y104E/HC-Q111P heavy chain variable domain amino acid A119
QVQLKQSGPGLVQPSQSLSITCTVVGFSLTNYGVHWVRQSPGKGLEWLGVIWSGGNTDYNTPFTSRLSINKDNSKSQVFFKMNSLQSNDTAIYYCARALTYYDEEFAYWGPGTLVTVSA

SEQ ID NO: 94 - protein, 449 aa, Artificial Sequence
  HC-S25V/HC-S53G/HC-Y104E heavy chain amino acid S119
  DOMAIN (1)...(119): variable domain
  DOMAIN (120)...(217): CH1
  DOMAIN (218)...(232): hinge region
  DOMAIN (233)...(342): CH2
  DOMAIN (343)...(449): CH3
QVQLKQSGPGLVQPSQSLSITCTVVGFSLTNYGVHWVRQSPGKGLEWLGVIWGGGNTDYNTPFTSRLSINKDNSKSQVFFKMNSLQSNDTAIYYCARALTYYDEEFAYWGQGTLVTVSSASTKGPSVFPLAPSSKSTSGGTAALGCLVKDYFPEPVTVSWNSGALTSGVHTFPAVLQSSGLYSLSSVVTVPSSSLGTQTYICNVNHKPSNTKVDKKVEPKSCDKTHTCPPCPAPELLGGPSVFLFPPKPKDTLMISRTPEVTCVVVDVSHEDPEVKFNWYVDGVEVHNAKTKPREEQYNSTYRVVSVLTVLHQDWLNGKEYKCKVSNKALPAPIEKTISKAKGQPREPQVYTLPPSRDELTKNQVSLTCLVKGFYPSDIAVEWESNGQPENNYKTTPPVLDSDGSFFLYSKLTVDKSRWQQGNVFSCSVMHEALHNHYTQKSLSLSPGK

SEQ ID NO: 95 - protein, 119 aa, Artificial Sequence
  HC-S25V/HC-S53G/HC-Y104E heavy chain variable domain amino acid S119
QVQLKQSGPGLVQPSQSLSITCTVVGFSLTNYGVHWVRQSPGKGLEWLGVIWGGGNTDYNTPFTSRLSINKDNSKSQVFFKMNSLQSNDTAIYYCARALTYYDEEFAYWGQGTLVTVSS

SEQ ID NO: 96 - protein, 119 aa, Artificial Sequence
  HC-S25V/HC-S53G/HC-Y104E heavy chain variable domain amino acid A119
QVQLKQSGPGLVQPSQSLSITCTVVGFSLTNYGVHWVRQSPGKGLEWLGVIWGGGNTDYNTPFTSRLSINKDNSKSQVFFKMNSLQSNDTAIYYCARALTYYDEEFAYWGQGTLVTVSA

SEQ ID NO: 97 - protein, 449 aa, Artificial Sequence
  HC-S25V/HC-S53G/HC-Y104E/HC-Q111P heavy chain amino acid S119
  DOMAIN (1)...(119): variable domain
  DOMAIN (120)...(217): CH1
  DOMAIN (218)...(232): hinge region
  DOMAIN (233)...(342): CH2
  DOMAIN (343)...(449): CH3
QVQLKQSGPGLVQPSQSLSITCTVVGFSLTNYGVHWVRQSPGKGLEWLGVIWGGGNTDYNTPFTSRLSINKDNSKSQVFFKMNSLQSNDTAIYYCARALTYYDEEFAYWGPGTLVTVSSASTKGPSVFPLAPSSKSTSGGTAALGCLVKDYFPEPVTVSWNSGALTSGVHTFPAVLQSSGLYSLSSVVTVPSSSLGTQTYICNVNHKPSNTKVDKKVEPKSCDKTHTCPPCPAPELLGGPSVFLFPPKPKDTLMISRTPEVTCVVVDVSHEDPEVKFNWYVDGVEVHNAKTKPREEQYNSTYRVVSVLTVLHQDWLNGKEYKCKVSNKALPAPIEKTISKAKGQPREPQVYTLPPSRDELTKNQVSLTCLVKGFYPSDIAVEWESNGQPENNYKTTPPVLDSDGSFFLYSKLTVDKSRWQQGNVFSCSVMHEALHNHYTQKSLSLSPGK

SEQ ID NO: 98 - protein, 119 aa, Artificial Sequence
  HC-S25V/HC-S53G/HC-Y104E/HC-Q111P heavy chain variable domain amino acid S119
QVQLKQSGPGLVQPSQSLSITCTVVGFSLTNYGVHWVRQSPGKGLEWLGVIWGGGNTDYNTPFTSRLSINKDNSKSQVFFKMNSLQSNDTAIYYCARALTYYDEEFAYWGPGTLVTVSS

SEQ ID NO: 99 - protein, 119 aa, Artificial Sequence
  HC-S25V/HC-S53G/HC-Y104E/HC-Q111P heavy chain variable domain amino acid A119
QVQLKQSGPGLVQPSQSLSITCTVVGFSLTNYGVHWVRQSPGKGLEWLGVIWGGGNTDYNTPFTSRLSINKDNSKSQVFFKMNSLQSNDTAIYYCARALTYYDEEFAYWGPGTLVTVSA

SEQ ID NO: 100 - protein, 449 aa, Artificial Sequence
  HC-T30F/HC-Y104E heavy chain amino acid S119
  DOMAIN (1)...(119): variable domain
  DOMAIN (120)...(217): CH1
  DOMAIN (218)...(232): hinge region
  DOMAIN (233)...(342): CH2
  DOMAIN (343)...(449): CH3
QVQLKQSGPGLVQPSQSLSITCTVSGFSLFNYGVHWVRQSPGKGLEWLGVIWSGGNTDYNTPFTSRLSINKDNSKSQVFFKMNSLQSNDTAIYYCARALTYYDEEFAYWGQGTLVTVSSASTKGPSVFPLAPSSKSTSGGTAALGCLVKDYFPEPVTVSWNSGALTSGVHTFPAVLQSSGLYSLSSVVTVPSSSLGTQTYICNVNHKPSNTKVDKKVEPKSCDKTHTCPPCPAPELLGGPSVFLFPPKPKDTLMISRTPEVTCVVVDVSHEDPEVKFNWYVDGVEVHNAKTKPREEQYNSTYRVVSVLTVLHQDWLNGKEYKCKVSNKALPAPIEKTISKAKGQPREPQVYTLPPSRDELTKNQVSLTCLVKGFYPSDIAVEWESNGQPENNYKTTPPVLDSDGSFFLYSKLTVDKSRWQQGNVFSCSVMHEALHNHYTQKSLSLSPGK

SEQ ID NO: 101 - protein, 119 aa, Artificial Sequence
  HC-T30F/HC-Y104E heavy chain variable domain amino acid S119
QVQLKQSGPGLVQPSQSLSITCTVSGFSLFNYGVHWVRQSPGKGLEWLGVIWSGGNTDYNTPFTSRLSINKDNSKSQVFFKMNSLQSNDTAIYYCARALTYYDEEFAYWGQGTLVTVSS

SEQ ID NO: 102 - protein, 119 aa, Artificial Sequence
  HC-T30F/HC-Y104E heavy chain variable domain amino acid A119
QVQLKQSGPGLVQPSQSLSITCTVSGFSLFNYGVHWVRQSPGKGLEWLGVIWSGGNTDYNTPFTSRLSINKDNSKSQVFFKMNSLQSNDTAIYYCARALTYYDEEFAYWGQGTLVTVSA

SEQ ID NO: 103 - protein, 449 aa, Artificial Sequence
  HC-T30F/HC-Y104E/HC-Q111P heavy chain amino acid S119
  DOMAIN (1)...(119): variable domain
  DOMAIN (120)...(217): CH1
  DOMAIN (218)...(232): hinge region
  DOMAIN (233)...(342): CH2
  DOMAIN (343)...(449): CH3
QVQLKQSGPGLVQPSQSLSITCTVSGFSLFNYGVHWVRQSPGKGLEWLGVIWSGGNTDYNTPFTSRLSINKDNSKSQVFFKMNSLQSNDTAIYYCARALTYYDEEFAYWGPGTLVTVSSASTKGPSVFPLAPSSKSTSGGTAALGCLVKDYFPEPVTVSWNSGALTSGVHTFPAVLQSSGLYSLSSVVTVPSSSLGTQTYICNVNHKPSNTKVDKKVEPKSCDKTHTCPPCPAPELLGGPSVFLFPPKPKDTLMISRTPEVTCVVVDVSHEDPEVKFNWYVDGVEVHNAKTKPREEQYNSTYRVVSVLTVLHQDWLNGKEYKCKVSNKALPAPIEKTISKAKGQPREPQVYTLPPSRDELTKNQVSLTCLVKGFYPSDIAVEWESNGQPENNYKTTPPVLDSDGSFFLYSKLTVDKSRWQQGNVFSCSVMHEALHNHYTQKSLSLSPGK

SEQ ID NO: 104 - protein, 119 aa, Artificial Sequence
  HC-T30F/HC-Y104E/HC-Q111P heavy chain variable domain amino acid S119
QVQLKQSGPGLVQPSQSLSITCTVSGFSLFNYGVHWVRQSPGKGLEWLGVIWSGGNTDYNTPFTSRLSINKDNSKSQVFFKMNSLQSNDTAIYYCARALTYYDEEFAYWGPGTLVTVSS

SEQ ID NO: 105 - protein, 119 aa, Artificial Sequence
  HC-T30F/HC-Y104E/HC-Q111P heavy chain variable domain amino acid A119
QVQLKQSGPGLVQPSQSLSITCTVSGFSLFNYGVHWVRQSPGKGLEWLGVIWSGGNTDYNTPFTSRLSINKDNSKSQVFFKMNSLQSNDTAIYYCARALTYYDEEFAYWGPGTLVTVSA

SEQ ID NO: 106 - protein, 449 aa, Artificial Sequence
  HC-T30F/HC-S53G/HC-Y104E heavy chain amino acid S119
  DOMAIN (1)...(119): variable domain
  DOMAIN (120)...(217): CH1
  DOMAIN (218)...(232): hinge region
  DOMAIN (233)...(342): CH2
  DOMAIN (343)...(449): CH3
QVQLKQSGPGLVQPSQSLSITCTVSGFSLFNYGVHWVRQSPGKGLEWLGVIWGGGNTDYNTPFTSRLSINKDNSKSQVFFKMNSLQSNDTAIYYCARALTYYDEEFAYWGQGTLVTVSSASTKGPSVFPLAPSSKSTSGGTAALGCLVKDYFPEPVTVSWNSGALTSGVHTFPAVLQSSGLYSLSSVVTVPSSSLGTQTYICNVNHKPSNTKVDKKVEPKSCDKTHTCPPCPAPELLGGPSVFLFPPKPKDTLMISRTPEVTCVVVDVSHEDPEVKFNWYVDGVEVHNAKTKPREEQYNSTYRVVSVLTVLHQDWLNGKEYKCKVSNKALPAPIEKTISKAKGQPREPQVYTLPPSRDELTKNQVSLTCLVKGFYPSDIAVEWESNGQPENNYKTTPPVLDSDGSFFLYSKLTVDKSRWQQGNVFSCSVMHEALHNHYTQKSLSLSPGK

SEQ ID NO: 107 - protein, 119 aa, Artificial Sequence
  HC-T30F/HC-S53G/HC-Y104E heavy chain variable domain amino acid S119
QVQLKQSGPGLVQPSQSLSITCTVSGFSLFNYGVHWVRQSPGKGLEWLGVIWGGGNTDYNTPFTSRLSINKDNSKSQVFFKMNSLQSNDTAIYYCARALTYYDEEFAYWGQGTLVTVSS

SEQ ID NO: 108 - protein, 119 aa, Artificial Sequence
  HC-T30F/HC-S53G/HC-Y104E heavy chain variable domain amino acid A119
QVQLKQSGPGLVQPSQSLSITCTVSGFSLFNYGVHWVRQSPGKGLEWLGVIWGGGNTDYNTPFTSRLSINKDNSKSQVFFKMNSLQSNDTAIYYCARALTYYDEEFAYWGQGTLVTVSA

SEQ ID NO: 109 - protein, 449 aa, Artificial Sequence
  HC-T30F/HC-S53G/HC-Y104E/HC-Q111P heavy chain amino acid S119
  DOMAIN (1)...(119): variable domain
  DOMAIN (120)...(217): CH1
  DOMAIN (218)...(232): hinge region
  DOMAIN (233)...(342): CH2
  DOMAIN (343)...(449): CH3
QVQLKQSGPGLVQPSQSLSITCTVSGFSLFNYGVHWVRQSPGKGLEWLGVIWGGGNTDYNTPFTSRLSINKDNSKSQVFFKMNSLQSNDTAIYYCARALTYYDEEFAYWGPGTLVTVSSASTKGPSVFPLAPSSKSTSGGTAALGCLVKDYFPEPVTVSWNSGALTSGVHTFPAVLQSSGLYSLSSVVTVPSSSLGTQTYICNVNHKPSNTKVDKKVEPKSCDKTHTCPPCPAPELLGGPSVFLFPPKPKDTLMISRTPEVTCVVVDVSHEDPEVKFNWYVDGVEVHNAKTKPREEQYNSTYRVVSVLTVLHQDWLNGKEYKCKVSNKALPAPIEKTISKAKGQPREPQVYTLPPSRDELTKNQVSLTCLVKGFYPSDIAVEWESNGQPENNYKTTPPVLDSDGSFFLYSKLTVDKSRWQQGNVFSCSVMHEALHNHYTQKSLSLSPGK

SEQ ID NO: 110 - protein, 119 aa, Artificial Sequence
  HC-T30F/HC-S53G/HC-Y104E/HC-Q111P heavy chain variable domain amino acid S119
QVQLKQSGPGLVQPSQSLSITCTVSGFSLFNYGVHWVRQSPGKGLEWLGVIWGGGNTDYNTPFTSRLSINKDNSKSQVFFKMNSLQSNDTAIYYCARALTYYDEEFAYWGPGTLVTVSS

SEQ ID NO: 111 - protein, 119 aa, Artificial Sequence
  HC-T30F/HC-S53G/HC-Y104E/HC-Q111P heavy chain variable domain amino acid A119
QVQLKQSGPGLVQPSQSLSITCTVSGFSLFNYGVHWVRQSPGKGLEWLGVIWGGGNTDYNTPFTSRLSINKDNSKSQVFFKMNSLQSNDTAIYYCARALTYYDEEFAYWGPGTLVTVSA

SEQ ID NO: 112 - protein, 449 aa, Artificial Sequence
  HC-D72L/HC-Y104E heavy chain amino acid S119
  DOMAIN (1)...(119): variable domain
  DOMAIN (120)...(217): CH1
  DOMAIN (218)...(232): hinge region
  DOMAIN (233)...(342): CH2
  DOMAIN (343)...(449): CH3
QVQLKQSGPGLVQPSQSLSITCTVSGFSLTNYGVHWVRQSPGKGLEWLGVIWSGGNTDYNTPFTSRLSINKLNSKSQVFFKMNSLQSNDTAIYYCARALTYYDEEFAYWGQGTLVTVSSASTKGPSVFPLAPSSKSTSGGTAALGCLVKDYFPEPVTVSWNSGALTSGVHTFPAVLQSSGLYSLSSVVTVPSSSLGTQTYICNVNHKPSNTKVDKKVEPKSCDKTHTCPPCPAPELLGGPSVFLFPPKPKDTLMISRTPEVTCVVVDVSHEDPEVKFNWYVDGVEVHNAKTKPREEQYNSTYRVVSVLTVLHQDWLNGKEYKCKVSNKALPAPIEKTISKAKGQPREPQVYTLPPSRDELTKNQVSLTCLVKGFYPSDIAVEWESNGQPENNYKTTPPVLDSDGSFFLYSKLTVDKSRWQQGNVFSCSVMHEALHNHYTQKSLSLSPGK

SEQ ID NO: 113 - protein, 119 aa, Artificial Sequence
  HC-D72L/HC-Y104E heavy chain variable domain amino acid S119
QVQLKQSGPGLVQPSQSLSITCTVSGFSLTNYGVHWVRQSPGKGLEWLGVIWSGGNTDYNTPFTSRLSINKLNSKSQVFFKMNSLQSNDTAIYYCARALTYYDEEFAYWGQGTLVTVSS

SEQ ID NO: 114 - protein, 119 aa, Artificial Sequence
  HC-D72L/HC-Y104E heavy chain variable domain amino acid A119
QVQLKQSGPGLVQPSQSLSITCTVSGFSLTNYGVHWVRQSPGKGLEWLGVIWSGGNTDYNTPFTSRLSINKLNSKSQVFFKMNSLQSNDTAIYYCARALTYYDEEFAYWGQGTLVTVSA

SEQ ID NO: 115 - protein, 449 aa, Artificial Sequence
  HC-D72L/HC-Y104E/HC-Q111P heavy chain amino acid S119
  DOMAIN (1)...(119): variable domain
  DOMAIN (120)...(217): CH1
  DOMAIN (218)...(232): hinge region
  DOMAIN (233)...(342): CH2
  DOMAIN (343)...(449): CH3
QVQLKQSGPGLVQPSQSLSITCTVSGFSLTNYGVHWVRQSPGKGLEWLGVIWSGGNTDYNTPFTSRLSINKLNSKSQVFFKMNSLQSNDTAIYYCARALTYYDEEFAYWGPGTLVTVSSASTKGPSVFPLAPSSKSTSGGTAALGCLVKDYFPEPVTVSWNSGALTSGVHTFPAVLQSSGLYSLSSVVTVPSSSLGTQTYICNVNHKPSNTKVDKKVEPKSCDKTHTCPPCPAPELLGGPSVFLFPPKPKDTLMISRTPEVTCVVVDVSHEDPEVKFNWYVDGVEVHNAKTKPREEQYNSTYRVVSVLTVLHQDWLNGKEYKCKVSNKALPAPIEKTISKAKGQPREPQVYTLPPSRDELTKNQVSLTCLVKGFYPSDIAVEWESNGQPENNYKTTPPVLDSDGSFFLYSKLTVDKSRWQQGNVFSCSVMHEALHNHYTQKSLSLSPGK

SEQ ID NO: 116 - protein, 119 aa, Artificial Sequence
  HC-D72L/HC-Y104E/HC-Q111P heavy chain variable domain amino acid S119
QVQLKQSGPGLVQPSQSLSITCTVSGFSLTNYGVHWVRQSPGKGLEWLGVIWSGGNTDYNTPFTSRLSINKLNSKSQVFFKMNSLQSNDTAIYYCARALTYYDEEFAYWGPGTLVTVSS

SEQ ID NO: 117 - protein, 119 aa, Artificial Sequence
  HC-D72L/HC-Y104E/HC-Q111P heavy chain variable domain amino acid A119
QVQLKQSGPGLVQPSQSLSITCTVSGFSLTNYGVHWVRQSPGKGLEWLGVIWSGGNTDYNTPFTSRLSINKLNSKSQVFFKMNSLQSNDTAIYYCARALTYYDEEFAYWGPGTLVTVSA

SEQ ID NO: 118 - protein, 449 aa, Artificial Sequence
  HC-S53G/HC-D72L/HC-Y104E heavy chain amino acid S119
  variable domain
  DOMAIN (120)...(217): CH1
  DOMAIN (218)...(232): hinge region
  DOMAIN (233)...(342): CH2
  DOMAIN (343)...(449): CH3
QVQLKQSGPGLVQPSQSLSITCTVSGFSLTNYGVHWVRQSPGKGLEWLGVIWGGGNTDYNTPFTSRLSINKLNSKSQVFFKMNSLQSNDTAIYYCARALTYYDEEFAYWGQGTLVTVSSASTKGPSVFPLAPSSKSTSGGTAALGCLVKDYFPEPVTVSWNSGALTSGVHTFPAVLQSSGLYSLSSVVTVPSSSLGTQTYICNVNHKPSNTKVDKKVEPKSCDKTHTCPPCPAPELLGGPSVFLFPPKPKDTLMISRTPEVTCVVVDVSHEDPEVKFNWYVDGVEVHNAKTKPREEQYNSTYRVVSVLTVLHQDWLNGKEYKCKVSNKALPAPIEKTISKAKGQPREPQVYTLPPSRDELTKNQVSLTCLVKGFYPSDIAVEWESNGQPENNYKTTPPVLDSDGSFFLYSKLTVDKSRWQQGNVFSCSVMHEALHNHYTQKSLSLSPGK

SEQ ID NO: 119 - protein, 119 aa, Artificial Sequence
  HC-S53G/HC-D72L/HC-Y104E heavy chain variable domain amino acid S119
QVQLKQSGPGLVQPSQSLSITCTVSGFSLTNYGVHWVRQSPGKGLEWLGVIWGGGNTDYNTPFTSRLSINKLNSKSQVFFKMNSLQSNDTAIYYCARALTYYDEEFAYWGQGTLVTVSS

SEQ ID NO: 120 - protein, 119 aa, Artificial Sequence
  HC-S53G/HC-D72L/HC-Y104E heavy chain variable domain amino acid A119
QVQLKQSGPGLVQPSQSLSITCTVSGFSLTNYGVHWVRQSPGKGLEWLGVIWGGGNTDYNTPFTSRLSINKLNSKSQVFFKMNSLQSNDTAIYYCARALTYYDEEFAYWGQGTLVTVSA

SEQ ID NO: 121 - protein, 449 aa, Artificial Sequence
  HC-S53G/HC-D72L/HC-Y104E/HC-Q111P heavy chain amino acid S119
  DOMAIN (1)...(119): variable domain
  DOMAIN (120)...(217): CH1
  DOMAIN (218)...(232): hinge region
  DOMAIN (233)...(342): CH2
  DOMAIN (343)...(449): CH3
QVQLKQSGPGLVQPSQSLSITCTVSGFSLTNYGVHWVRQSPGKGLEWLGVIWGGGNTDYNTPFTSRLSINKLNSKSQVFFKMNSLQSNDTAIYYCARALTYYDEEFAYWGPGTLVTVSSASTKGPSVFPLAPSSKSTSGGTAALGCLVKDYFPEPVTVSWNSGALTSGVHTFPAVLQSSGLYSLSSVVTVPSSSLGTQTYICNVNHKPSNTKVDKKVEPKSCDKTHTCPPCPAPELLGGPSVFLFPPKPKDTLMISRTPEVTCVVVDVSHEDPEVKFNWYVDGVEVHNAKTKPREEQYNSTYRVVSVLTVLHQDWLNGKEYKCKVSNKALPAPIEKTISKAKGQPREPQVYTLPPSRDELTKNQVSLTCLVKGFYPSDIAVEWESNGQPENNYKTTPPVLDSDGSFFLYSKLTVDKSRWQQGNVFSCSVMHEALHNHYTQKSLSLSPGK

SEQ ID NO: 122 - protein, 119 aa, Artificial Sequence
  HC-S53G/HC-D72L/HC-Y104E/HC-Q111P heavy chain variable domain amino acid S119
QVQLKQSGPGLVQPSQSLSITCTVSGFSLTNYGVHWVRQSPGKGLEWLGVIWGGGNTDYNTPFTSRLSINKLNSKSQVFFKMNSLQSNDTAIYYCARALTYYDEEFAYWGPGTLVTVSS

SEQ ID NO: 123 - protein, 119 aa, Artificial Sequence
  HC-S53G/HC-D72L/HC-Y104E/HC-Q111P heavy chain variable domain amino acid A119
QVQLKQSGPGLVQPSQSLSITCTVSGFSLTNYGVHWVRQSPGKGLEWLGVIWGGGNTDYNTPFTSRLSINKLNSKSQVFFKMNSLQSNDTAIYYCARALTYYDEEFAYWGPGTLVTVSA

SEQ ID NO: 124 - protein, 214 aa, Artificial Sequence
  LC-I29S light chain amino acid Q100 VEIK104-107 EC213-214
  DOMAIN (1)...(107): variable domain
  DOMAIN (108)...(214): constant domain
DILLTQSPVILSVSPGERVSFSCRASQSSGTNIHWYQQRTNGSPRLLIKYASESISGIPSRFSGSGSGTDFTLSINSVESEDIADYYCQQNNNWPTTFGQGTKVEIKRTVAAPSVFIFPPSDEQLKSGTASVVCLLNNFYPREAKVQWKVDNALQSGNSQESVTEQDSKDSTYSLSSTLTLSKADYEKHKVYACEVTHQGLSSPVTKSFNRGEC

SEQ ID NO: 125 - protein, 107 aa, Artificial Sequence
  LC-I29S light chain variable domain amino acid Q100 VEIK104-107
DILLTQSPVILSVSPGERVSFSCRASQSSGTNIHWYQQRTNGSPRLLIKYASESISGIPSRFSGSGSGTDFTLSINSVESEDIADYYCQQNNNWPTTFGQGTKVEIK

SEQ ID NO: 126 - protein, 107 aa, Artificial Sequence
  LC-I29S light chain variable domain amino acid A100 LELK104-107
DILLTQSPVILSVSPGERVSFSCRASQSSGTNIHWYQQRTNGSPRLLIKYASESISGIPSRFSGSGSGTDFTLSINSVESEDIADYYCQQNNNWPTTFGAGTKLELK

SEQ ID NO: 127 - protein, 107 aa, Artificial Sequence
  LC-I29S light chain variable domain amino acid Q100 LELK104-107
DILLTQSPVILSVSPGERVSFSCRASQSSGTNIHWYQQRTNGSPRLLIKYASESISGIPSRFSGSGSGTDFTLSINSVESEDIADYYCQQNNNWPTTFGEGTKLELK

SEQ ID NO: 128 - DNA, 1347 bp, Artificial Sequence
  EP-h1, 2, 4, 5, 6, 8 heavy chain nucleic acid S119
  variation 312: n = a or g
  V_region (1)...(357)
  C_region (358)...(1347)
caggtacagctgcagcagtcaggtccaggactggtgaagccctcgcagaccctctcactcacctgtgccatctctggtttctcattaactaactatggtgtacactggatccgccagcccccagggaaggggctggagtggattggtgtgatatggagtggtggaaacacagactataatacacctttcacatccagattcaccatctccagagatgattcaaagaacacggcgtatctgcaaatgaacagcctgaaaaccgaggacacggccgtgtattactgtgccagagccctcacctactatgatgangagtttgcttactggggccctggaacgctggtcaccgtcagctcagcctccaccaagggcccatcggtcttccccctggcaccctcctccaagagcacctctgggggcacagcggccctgggctgcctggtcaaggactacttccccgaaccggtgacggtgtcgtggaactcaggcgccctgaccagcggcgtgcacaccttcccggctgtcctacagtcctcaggactctactccctcagcagcgtggtgaccgtgccctccagcagcttgggcacccagacctacatctgcaacgtgaatcacaagcccagcaacaccaaggtggacaagaaagttgagcccaaatcttgtgacaaaactcacacatgcccaccgtgcccagcacctgaactcctggggggaccgtcagtcttcctcttccccccaaaacccaaggacaccctcatgatctcccggacccctgaggtcacatgcgtggtggtggacgtgagccacgaagaccctgaggtcaagttcaactggtacgtggacggcgtggaggtgcataatgccaagacaaagccgcgggaggagcagtacaacagcacgtaccgtgtggtcagcgtcctcaccgtcctgcaccaggactggctgaatggcaaggagtacaagtgcaaggtcagcaacaaagccctcccagcccccatcgagaaaaccatctccaaagccaaagggcagccccgagaaccacaggtgtacaccctgcccccatcccgggatgagctgaccaagaaccaggtcagcctgacctgcctggtcaaaggcttctatcccagcgacatcgccgtggagtgggagagcaatgggcagccggagaacaactacaagaccacgcctcccgtgctggactccgacggctccttcttcctctacagcaagctcaccgtggacaagagcaggtggcagcaggggaacgtcttctcatgctccgtgatgcatgaggctctgcacaaccactacacgcagaagagcctctccctgtctccgggtaaa

SEQ ID NO: 129 - protein, 449 aa, Artificial Sequence
  EP-h1, 2, 4, 5, 6, 8 heavy chain amino acid S119
  DOMAIN (1)...(119): variable domain
  DOMAIN (120)...(217): CH1
  DOMAIN (218)...(232): hinge region
  DOMAIN (233)...(342): CH2
  DOMAIN (343)...(449): CH3
QVQLQQSGPGLVKPSQTLSLTCAISGFSLTNYGVHWIRQPPGKGLEWIGVIWSGGNTDYNTPFTSRFTISRDDSKNTAYLQMNSLKTEDTAVYYCARALTYYDEEFAYWGPGTLVTVSSASTKGPSVFPLAPSSKSTSGGTAALGCLVKDYFPEPVTVSWNSGALTSGVHTFPAVLQSSGLYSLSSVVTVPSSSLGTQTYICNVNHKPSNTKVDKKVEPKSCDKTHTCPPCPAPELLGGPSVFLFPPKPKDTLMISRTPEVTCVVVDVSHEDPEVKFNWYVDGVEVHNAKTKPREEQYNSTYRVVSVLTVLHQDWLNGKEYKCKVSNKALPAPIEKTISKAKGQPREPQVYTLPPSRDELTKNQVSLTCLVKGFYPSDIAVEWESNGQPENNYKTTPPVLDSDGSFFLYSKLTVDKSRWQQGNVFSCSVMHEALHNHYTQKSLSLSPGK

SEQ ID NO: 130 - DNA, 357 bp, Artificial Sequence
  EP-h1, 2, 4, 5, 6, 8 heavy chain variable domain nucleic acid S119
  variation 312: n = a or g
caggtacagctgcagcagtcaggtccaggactggtgaagccctcgcagaccctctcactcacctgtgccatctctggtttctcattaactaactatggtgtacactggatccgccagcccccagggaaggggctggagtggattggtgtgatatggagtggtggaaacacagactataatacacctttcacatccagattcaccatctccagagatgattcaaagaacacggcgtatctgcaaatgaacagcctgaaaaccgaggacacggccgtgtattactgtgccagagccctcacctactatgatgangagtttgcttactggggccctggaacgctggtcaccgtcagctca

SEQ ID NO: 131 - protein, 119 aa, Artificial Sequence
  EP-h1, 2, 4, 5, 6, 8 heavy chain variable domain amino acid S119
QVQLQQSGPGLVKPSQTLSLTCAISGFSLTNYGVHWIRQPPGKGLEWIGVIWSGGNTDYNTPFTSRFTISRDDSKNTAYLQMNSLKTEDTAVYYCARALTYYDEEFAYWGPGTLVTVSS

SEQ ID NO: 132 - DNA, 357 bp, Artificial Sequence
  EP-h1, 2, 4, 5, 6, 8 heavy chain variable domain nucleic acid A119
  variation 312: n = a or g
caggtacagctgcagcagtcaggtccaggactggtgaagccctcgcagaccctctcactcacctgtgccatctctggtttctcattaactaactatggtgtacactggatccgccagcccccagggaaggggctggagtggattggtgtgatatggagtggtggaaacacagactataatacacctttcacatccagattcaccatctccagagatgattcaaagaacacggcgtatctgcaaatgaacagcctgaaaaccgaggacacggccgtgtattactgtgccagagccctcacctactatgatgangagtttgcttactggggccctggaacgctggtcaccgtcagcgca

SEQ ID NO: 133 - protein, 119 aa, Artificial Sequence
  EP-h1, 2, 4, 5, 6, 8 heavy chain variable domain amino acid A119
QVQLQQSGPGLVKPSQTLSLTCAISGFSLTNYGVHWIRQPPGKGLEWIGVIWSGGNTDYNTPFTSRFTISRDDSKNTAYLQMNSLKTEDTAVYYCARALTYYDEEFAYWGPGTLVTVSA

SEQ ID NO: 134 - DNA, 1347 bp, Artificial Sequence
  EP-h3, 7 heavy chain nucleic acid S119
  variation 312: n = a or g
  V_region (1)...(357)
  C_region (358)...(1347)
gaggtccagctggtacagtctggggctgaggtgaagaagcctggggctacagtgaaaatctcctgcaaggtttctggtttctcattaactaactatggtgtacactgggtgcgacaggccactggacaagggcttgagtggatgggtgtgatatggagtggtggaaacacagactataatacacctttcacatccagattcaccatctccagagatgattcaaagaacacggcgtatctgcaaatgaacagcctgaaaaccgaggacacggccgtgtattactgtgccagagccctcacctactatgatgangagtttgcttactggggccctggaacgctggtcaccgtcagctcagcctccaccaagggcccatcggtcttccccctggcaccctcctccaagagcacctctgggggcacagcggccctgggctgcctggtcaaggactacttccccgaaccggtgacggtgtcgtggaactcaggcgccctgaccagcggcgtgcacaccttcccggctgtcctacagtcctcaggactctactccctcagcagcgtggtgaccgtgccctccagcagcttgggcacccagacctacatctgcaacgtgaatcacaagcccagcaacaccaaggtggacaagaaagttgagcccaaatcttgtgacaaaactcacacatgcccaccgtgcccagcacctgaactcctggggggaccgtcagtcttcctcttccccccaaaacccaaggacaccctcatgatctcccggacccctgaggtcacatgcgtggtggtggacgtgagccacgaagaccctgaggtcaagttcaactggtacgtggacggcgtggaggtgcataatgccaagacaaagccgcgggaggagcagtacaacagcacgtaccgtgtggtcagcgtcctcaccgtcctgcaccaggactggctgaatggcaaggagtacaagtgcaaggtcagcaacaaagccctcccagcccccatcgagaaaaccatctccaaagccaaagggcagccccgagaaccacaggtgtacaccctgcccccatcccgggatgagctgaccaagaaccaggtcagcctgacctgcctggtcaaaggcttctatcccagcgacatcgccgtggagtgggagagcaatgggcagccggagaacaactacaagaccacgcctcccgtgctggactccgacggctccttcttcctctacagcaagctcaccgtggacaagagcaggtggcagcaggggaacgtcttctcatgctccgtgatgcatgaggctctgcacaaccactacacgcagaagagcctctccctgtctccgggtaaa

SEQ ID NO: 135 - protein, 449 aa, Artificial Sequence
  EP-h3, 7 heavy chain amino acid S119
  DOMAIN (1)...(119): variable domain
  DOMAIN (120)...(217): CH1
  DOMAIN (218)...(232): hinge region
  DOMAIN (233)...(342): CH2
  DOMAIN (343)...(449): CH3
EVQLVQSGAEVKKPGATVKISCKVSGFSLTNYGVHWVRQATGQGLEWMGVIWSGGNTDYNTPFTSRFTISRDDSKNTAYLQMNSLKTEDTAVYYCARALTYYDEEFAYWGPGTLVTVSSASTKGPSVFPLAPSSKSTSGGTAALGCLVKDYFPEPVTVSWNSGALTSGVHTFPAVLQSSGLYSLSSVVTVPSSSLGTQTYICNVNHKPSNTKVDKKVEPKSCDKTHTCPPCPAPELLGGPSVFLFPPKPKDTLMISRTPEVTCVVVDVSHEDPEVKFNWYVDGVEVHNAKTKPREEQYNSTYRVVSVLTVLHQDWLNGKEYKCKVSNKALPAPIEKTISKAKGQPREPQVYTLPPSRDELTKNQVSLTCLVKGFYPSDIAVEWESNGQPENNYKTTPPVLDSDGSFFLYSKLTVDKSRWQQGNVFSCSVMHEALHNHYTQKSLSLSPGK

SEQ ID NO: 136 - DNA, 357 bp, Artificial Sequence
  EP-h3, 7 heavy chain variable domain nucleic acid S119
  variation 312: n = a or g
  V_region (1)...(357)
  C_region (358)...(1347)
gaggtccagctggtacagtctggggctgaggtgaagaagcctggggctacagtgaaaatctcctgcaaggtttctggtttctcattaactaactatggtgtacactgggtgcgacaggccactggacaagggcttgagtggatgggtgtgatatggagtggtggaaacacagactataatacacctttcacatccagattcaccatctccagagatgattcaaagaacacggcgtatctgcaaatgaacagcctgaaaaccgaggacacggccgtgtattactgtgccagagccctcacctactatgatgangagtttgcttactggggccctggaacgctggtcaccgtcagctca

SEQ ID NO: 137 - protein, 119 aa, Artificial Sequence
  EP-h3, 7 heavy chain variable domain amino acid S119
EVQLVQSGAEVKKPGATVKISCKVSGFSLTNYGVHWVRQATGQGLEWMGVIWSGGNTDYNTPFTSRFTISRDDSKNTAYLQMNSLKTEDTAVYYCARALTYYDEEFAYWGPGTLVTVSS

SEQ ID NO: 138 - DNA, 357 bp, Artificial Sequence
  EP-h3, 7 heavy chain variable domain nucleic acid A119
  variation 312: n = a or g
gaggtccagctggtacagtctggggctgaggtgaagaagcctggggctacagtgaaaatctcctgcaaggtttctggtttctcattaactaactatggtgtacactgggtgcgacaggccactggacaagggcttgagtggatgggtgtgatatggagtggtggaaacacagactataatacacctttcacatccagattcaccatctccagagatgattcaaagaacacggcgtatctgcaaatgaacagcctgaaaaccgaggacacggccgtgtattactgtgccagagccctcacctactatgatgangagtttgcttactggggccctggaacgctggtcaccgtcagcgca

SEQ ID NO: 139 - protein, 119 aa, Artificial Sequence
  EP-h3, 7 heavy chain variable domain amino acid A119
EVQLVQSGAEVKKPGATVKISCKVSGFSLTNYGVHWVRQATGQGLEWMGVIWSGGNTDYNTPFTSRFTISRDDSKNTAYLQMNSLKTEDTAVYYCARALTYYDEEFAYWGPGTLVTVSA

SEQ ID NO: 140 - DNA, 1347 bp, Artificial Sequence
  EP-h9, 12, 14 heavy chain nucleic acid S119
  variation 312: n = a or g
  V_region (1)...(357)
  C_region (358)...(1347)
gaggtccagctggtacagtctggggctgaggtgaagaagcctggggctacagtgaaaatctcctgcaaggtttctggtttctcattaactaactatggtgtacactggatcaggcagtccccatcgagaggccttgagtggctgggtgtgatatggagtggtggaaatacagactataatacacctttcacatccagactcaccatctccaaggacacctccaaaaaccaggtggtccttacaatgaccaacatggaccctgtggacacagccacgtattactgtgccagagccctcacctactatgatgangagtttgcttactggggccctggaacgctggtcaccgtcagctcagcctccaccaagggcccatcggtcttccccctggcaccctcctccaagagcacctctgggggcacagcggccctgggctgcctggtcaaggactacttccccgaaccggtgacggtgtcgtggaactcaggcgccctgaccagcggcgtgcacaccttcccggctgtcctacagtcctcaggactctactccctcagcagcgtggtgaccgtgccctccagcagcttgggcacccagacctacatctgcaacgtgaatcacaagcccagcaacaccaaggtggacaagaaagttgagcccaaatcttgtgacaaaactcacacatgcccaccgtgcccagcacctgaactcctggggggaccgtcagtcttcctcttccccccaaaacccaaggacaccctcatgatctcccggacccctgaggtcacatgcgtggtggtggacgtgagccacgaagaccctgaggtcaagttcaactggtacgtggacggcgtggaggtgcataatgccaagacaaagccgcgggaggagcagtacaacagcacgtaccgtgtggtcagcgtcctcaccgtcctgcaccaggactggctgaatggcaaggagtacaagtgcaaggtcagcaacaaagccctcccagcccccatcgagaaaaccatctccaaagccaaagggcagccccgagaaccacaggtgtacaccctgcccccatcccgggatgagctgaccaagaaccaggtcagcctgacctgcctggtcaaaggcttctatcccagcgacatcgccgtggagtgggagagcaatgggcagccggagaacaactacaagaccacgcctcccgtgctggactccgacggctccttcttcctctacagcaagctcaccgtggacaagagcaggtggcagcaggggaacgtcttctcatgctccgtgatgcatgaggctctgcacaaccactacacgcagaagagcctctccctgtctccgggtaaa

SEQ ID NO: 141 - protein, 449 aa, Artificial Sequence
  EP-h9, 12, 14 heavy chain amino acid S119
  DOMAIN (1)...(119): variable domain
  DOMAIN (120)...(217): CH1
  DOMAIN (218)...(232): hinge region
  DOMAIN (233)...(342): CH2
  DOMAIN (343)...(449): CH3
EVQLVQSGAEVKKPGATVKISCKVSGFSLTNYGVHWIRQSPSRGLEWLGVIWSGGNTDYNTPFTSRLTISKDTSKNQVVLTMTNMDPVDTATYYCARALTYYDEEFAYWGPGTLVTVSSASTKGPSVFPLAPSSKSTSGGTAALGCLVKDYFPEPVTVSWNSGALTSGVHTFPAVLQSSGLYSLSSVVTVPSSSLGTQTYICNVNHKPSNTKVDKKVEPKSCDKTHTCPPCPAPELLGGPSVFLFPPKPKDTLMISRTPEVTCVVVDVSHEDPEVKFNWYVDGVEVHNAKTKPREEQYNSTYRVVSVLTVLHQDWLNGKEYKCKVSNKALPAPIEKTISKAKGQPREPQVYTLPPSRDELTKNQVSLTCLVKGFYPSDIAVEWESNGQPENNYKTTPPVLDSDGSFFLYSKLTVDKSRWQQGNVFSCSVMHEALHNHYTQKSLSLSPGK

SEQ ID NO: 142 - DNA, 357 bp, Artificial Sequence
  EP-h9, 12, 14 heavy chain variable domain nucleic acid S119
  variation 312: n = a or g
gaggtccagctggtacagtctggggctgaggtgaagaagcctggggctacagtgaaaatctcctgcaaggtttctggtttctcattaactaactatggtgtacactggatcaggcagtccccatcgagaggccttgagtggctgggtgtgatatggagtggtggaaatacagactataatacacctttcacatccagactcaccatctccaaggacacctccaaaaaccaggtggtccttacaatgaccaacatggaccctgtggacacagccacgtattactgtgccagagccctcacctactatgatgangagtttgcttactggggccctggaacgctggtcaccgtcagctca

SEQ ID NO: 143 - protein, 119 aa, Artificial Sequence
  EP-h9, 12, 14 heavy chain variable domain amino acid S119
EVQLVQSGAEVKKPGATVKISCKVSGFSLTNYGVHWIRQSPSRGLEWLGVIWSGGNTDYNTPFTSRLTISKDTSKNQVVLTMTNMDPVDTATYYCARALTYYDEEFAYWGPGTLVTVSS

SEQ ID NO: 144 - DNA, 357 bp, Artificial Sequence
  EP-h9, 12, 14 heavy chain variable domain nucleic acid A119
  variation 312: n = a or g
gaggtccagctggtacagtctggggctgaggtgaagaagcctggggctacagtgaaaatctcctgcaaggtttctggtttctcattaactaactatggtgtacactggatcaggcagtccccatcgagaggccttgagtggctgggtgtgatatggagtggtggaaatacagactataatacacctttcacatccagactcaccatctccaaggacacctccaaaaaccaggtggtccttacaatgaccaacatggaccctgtggacacagccacgtattactgtgccagagccctcacctactatgatgangagtttgcttactggggccctggaacgctggtcaccgtcagcgca

SEQ ID NO: 145 - protein, 119 aa, Artificial Sequence
  EP-h9, 12, 14 heavy chain variable domain amino acid A119
EVQLVQSGAEVKKPGATVKISCKVSGFSLTNYGVHWIRQSPSRGLEWLGVIWSGGNTDYNTPFTSRLTISKDTSKNQVVLTMTNMDPVDTATYYCARALTYYDEEFAYWGPGTLVTVSA

SEQ ID NO: 146 - DNA, 1347 bp, Artificial Sequence
  EP-h10, 13 heavy chain nucleic acid S119
  variation 312: n = a or g
  V_region (1)...(357)
  C_region (358)...(1347)
gaggtccagctggtacagtctggggctgaggtgaagaagcctggggctacagtgaaaatctcctgcaaggtttctggtttctcattaactaactatggtgtacactggatccgccagcccccagggaaggggctggagtggattggtgtgatatggagtggtggaaacacagactataatacacctttcacatccagattcaccatctccagagacaacgccaagaactcactgtatctgcaaatgaacagcctgagagccgaggacacggctgtgtattactgtgccagagccctcacctactatgatgangagtttgcttactggggccctggaacgctggtcaccgtcagctcagcctccaccaagggcccatcggtcttccccctggcaccctcctccaagagcacctctgggggcacagcggccctgggctgcctggtcaaggactacttccccgaaccggtgacggtgtcgtggaactcaggcgccctgaccagcggcgtgcacaccttcccggctgtcctacagtcctcaggactctactccctcagcagcgtggtgaccgtgccctccagcagcttgggcacccagacctacatctgcaacgtgaatcacaagcccagcaacaccaaggtggacaagaaagttgagcccaaatcttgtgacaaaactcacacatgcccaccgtgcccagcacctgaactcctggggggaccgtcagtcttcctcttccccccaaaacccaaggacaccctcatgatctcccggacccctgaggtcacatgcgtggtggtggacgtgagccacgaagaccctgaggtcaagttcaactggtacgtggacggcgtggaggtgcataatgccaagacaaagccgcgggaggagcagtacaacagcacgtaccgtgtggtcagcgtcctcaccgtcctgcaccaggactggctgaatggcaaggagtacaagtgcaaggtcagcaacaaagccctcccagcccccatcgagaaaaccatctccaaagccaaagggcagccccgagaaccacaggtgtacaccctgcccccatcccgggatgagctgaccaagaaccaggtcagcctgacctgcctggtcaaaggcttctatcccagcgacatcgccgtggagtgggagagcaatgggcagccggagaacaactacaagaccacgcctcccgtgctggactccgacggctccttcttcctctacagcaagctcaccgtggacaagagcaggtggcagcaggggaacgtcttctcatgctccgtgatgcatgaggctctgcacaaccactacacgcagaagagcctctccctgtctccgggtaaa

SEQ ID NO: 147 - protein, 449 aa, Artificial Sequence
  EP-h10, 13 heavy chain amino acid S119
  DOMAIN (1)...(119): variable domain
  DOMAIN (120)...(217): CH1
  DOMAIN (218)...(232): hinge region
  DOMAIN (233)...(342): CH2
  DOMAIN (343)...(449): CH3
EVQLVQSGAEVKKPGATVKISCKVSGFSLTNYGVHWIRQPPGKGLEWIGVIWSGGNTDYNTPFTSRFTISRDNAKNSLYLQMNSLRAEDTAVYYCARALTYYDEEFAYWGPGTLVTVSSASTKGPSVFPLAPSSKSTSGGTAALGCLVKDYFPEPVTVSWNSGALTSGVHTFPAVLQSSGLYSLSSVVTVPSSSLGTQTYICNVNHKPSNTKVDKKVEPKSCDKTHTCPPCPAPELLGGPSVFLFPPKPKDTLMISRTPEVTCVVVDVSHEDPEVKFNWYVDGVEVHNAKTKPREEQYNSTYRVVSVLTVLHQDWLNGKEYKCKVSNKALPAPIEKTISKAKGQPREPQVYTLPPSRDELTKNQVSLTCLVKGFYPSDIAVEWESNGQPENNYKTTPPVLDSDGSFFLYSKLTVDKSRWQQGNVFSCSVMHEALHNHYTQKSLSLSPGK

SEQ ID NO: 148 - DNA, 357 bp, Artificial Sequence
  EP-h10, 13 heavy chain variable domain nucleic acid S119
  variation 312: n = a or g
gaggtccagctggtacagtctggggctgaggtgaagaagcctggggctacagtgaaaatctcctgcaaggtttctggtttctcattaactaactatggtgtacactggatccgccagcccccagggaaggggctggagtggattggtgtgatatggagtggtggaaacacagactataatacacctttcacatccagattcaccatctccagagacaacgccaagaactcactgtatctgcaaatgaacagcctgagagccgaggacacggctgtgtattactgtgccagagccctcacctactatgatgangagtttgcttactggggccctggaacgctggtcaccgtcagctca

SEQ ID NO: 149 - protein, 119 aa, Artificial Sequence
  EP-h10, 13 heavy chain variable domain amino acid S119
EVQLVQSGAEVKKPGATVKISCKVSGFSLTNYGVHWIRQPPGKGLEWIGVIWSGGNTDYNTPFTSRFTISRDNAKNSLYLQMNSLRAEDTAVYYCARALTYYDEEFAYWGPGTLVTVSS

SEQ ID NO: 150 - DNA, 357 bp, Artificial Sequence
  EP-h10, 13 heavy chain variable domain nucleic acid A119
  variation 312: n = a or g
gaggtccagctggtacagtctggggctgaggtgaagaagcctggggctacagtgaaaatctcctgcaaggtttctggtttctcattaactaactatggtgtacactggatccgccagcccccagggaaggggctggagtggattggtgtgatatggagtggtggaaacacagactataatacacctttcacatccagattcaccatctccagagacaacgccaagaactcactgtatctgcaaatgaacagcctgagagccgaggacacggctgtgtattactgtgccagagccctcacctactatgatgangagtttgcttactggggccctggaacgctggtcaccgtcagcgca

SEQ ID NO: 151 - protein, 119 aa, Artificial Sequence
  EP-h10, 13 heavy chain variable domain amino acid A119
EVQLVQSGAEVKKPGATVKISCKVSGFSLTNYGVHWIRQPPGKGLEWIGVIWSGGNTDYNTPFTSRFTISRDNAKNSLYLQMNSLRAEDTAVYYCARALTYYDEEFAYWGPGTLVTVSA

SEQ ID NO: 152 - DNA, 642 bp, Artificial Sequence
  EP-h1, 3 light chain nucleic acid Q100 VEIK
  V_region (1)...(321)
  C_region (322)...(642)
gccatccagttgacccagtctccatcctccctgtctgcatctgtaggagacagagtcaccatcacttgcagggccagtcagagtattggcacaaacatacactggtaccagcagaaacctggccaggctcccaggctcctcatctattatgcttctgagtctatctctggggtcccatcaaggttcagcggcagtggatctgggacagatttcactctcaccatcagcagcctgcagcctgaagattttgcaacttattactgtcaacaaaataataactggccaaccacgttcggccaagggaccaaggtggaaatcaaacgtacggtggctgcaccatctgtcttcatcttcccgccatctgatgagcagttgaaatctggaactgcctctgttgtgtgcctgctgaataacttctatcccagagaggccaaagtacagtggaaggtggataacgccctccaatcgggtaactcccaggagagtgtcacagagcaggacagcaaggacagcacctacagcctcagcagcaccctgacgctgagcaaagcagactacgagaaacacaaagtctacgcctgcgaagtcacccatcagggcctgagctcgcccgtcacaaagagcttcaacaggggagagtgt

SEQ ID NO: 153 - protein, 214 aa, Artificial Sequence
  EP-h1, 3 light chain amino acid Q100 VEIK
  DOMAIN (1)...(107): variable domain
  DOMAIN (108)...(214): constant domain
AIQLTQSPSSLSASVGDRVTITCRASQSIGTNIHWYQQKPGQAPRLLIYYASESISGVPSRFSGSGSGTDFTLTISSLQPEDFATYYCQQNNNWPTTFGQGTKVEIKRTVAAPSVFIFPPSDEQLKSGTASVVCLLNNFYPREAKVQWKVDNALQSGNSQESVTEQDSKDSTYSLSSTLTLSKADYEKHKVYACEVTHQGLSSPVTKSFNRGEC

SEQ ID NO: 154 - DNA, 321 bp, Artificial Sequence
  EP-h1, 3 light chain variable domain nucleic acid Q100 VEIK
gccatccagttgacccagtctccatcctccctgtctgcatctgtaggagacagagtcaccatcacttgcagggccagtcagagtattggcacaaacatacactggtaccagcagaaacctggccaggctcccaggctcctcatctattatgcttctgagtctatctctggggtcccatcaaggttcagcggcagtggatctgggacagatttcactctcaccatcagcagcctgcagcctgaagattttgcaacttattactgtcaacaaaataataactggccaaccacgttcggccaagggaccaaggtggaaatcaaa

SEQ ID NO: 155 - protein, 107 aa, Artificial Sequence
  EP-h1, 3 light chain variable domain amino acid Q100 VEIK
AIQLTQSPSSLSASVGDRVTITCRASQSIGTNIHWYQQKPGQAPRLLIYYASESISGVPSRFSGSGSGTDFTLTISSLQPEDFATYYCQQNNNWPTTFGQGTKVEIK

SEQ ID NO: 156 - protein, 107 aa, Artificial Sequence
  EP-h1, 3 light chain variable domain amino acid A100 LELK
AIQLTQSPSSLSASVGDRVTITCRASQSIGTNIHWYQQKPGQAPRLLIYYASESISGVPSRFSGSGSGTDFTLTISSLQPEDFATYYCQQNNNWPTTFGAGTKLELK

SEQ ID NO: 157 - DNA, 321 bp, Artificial Sequence
  EP-h1, 3 light chain variable domain nucleic acid Q100 LELK
gccatccagttgacccagtctccatcctccctgtctgcatctgtaggagacagagtcaccatcacttgcagggccagtcagagtattggcacaaacatacactggtaccagcagaaacctggccaggctcccaggctcctcatctattatgcttctgagtctatctctggggtcccatcaaggttcagcggcagtggatctgggacagatttcactctcaccatcagcagcctgcagcctgaagattttgcaacttattactgtcaacaaaataataactggccaaccacgttcggccaagggaccaagctggagctgaaa

SEQ ID NO: 158 - protein, 107 aa, Artificial Sequence
  EP-h1, 3 light chain variable domain amino acid Q100 LELK
AIQLTQSPSSLSASVGDRVTITCRASQSIGTNIHWYQQKPGQAPRLLIYYASESISGVPSRFSGSGSGTDFTLTISSLQPEDFATYYCQQNNNWPTTFGQGTKLELK

SEQ ID NO: 159 - DNA, 642 bp, Artificial Sequence
  EP-h2 light chain nucleic acid Q100 VEIK
  V_region (1)...(321)
  C_region (322)...(642)
gccatccagttgacccagtctccatcctccctgtctgcatctgtaggagacagagtcaccatcacttgcagggccagtcagagtattggcacaaacatacactggtacctgcagaagccagggcagtctccacagctcctgatctattatgcttctgagtctatctctggggtcccatcaaggttcagcggcagtggatctgggacagatttcactctcaccatcagcagcctgcagcctgaagattttgcaacttattactgtcaacaaaataataactggccaaccacgttcggccaagggaccaaggtggaaatcaaacgtacggtggctgcaccatctgtcttcatcttcccgccatctgatgagcagttgaaatctggaactgcctctgttgtgtgcctgctgaataacttctatcccagagaggccaaagtacagtggaaggtggataacgccctccaatcgggtaactcccaggagagtgtcacagagcaggacagcaaggacagcacctacagcctcagcagcaccctgacgctgagcaaagcagactacgagaaacacaaagtctacgcctgcgaagtcacccatcagggcctgagctcgcccgtcacaaagagcttcaacaggggagagtgt

SEQ ID NO: 160 - protein, 214 aa, Artificial Sequence
  EP-h2 light chain amino acid Q100 VEIK
  DOMAIN (1)...(107): variable domain
  DOMAIN (108)...(214): constant domain
AIQLTQSPSSLSASVGDRVTITCRASQSIGTNIHWYLQKPGQSPQLLIYYASESISGVPSRFSGSGSGTDFTLTISSLQPEDFATYYCQQNNNWPTTFGQGTKVEIKRTVAAPSVFIFPPSDEQLKSGTASVVCLLNNFYPREAKVQWKVDNALQSGNSQESVTEQDSKDSTYSLSSTLTLSKADYEKHKVYACEVTHQGLSSPVTKSFNRGEC

SEQ ID NO: 161 - DNA, 321 bp, Artificial Sequence
  EP-h2 light chain variable domain nucleic acid Q100 VEIK
gccatccagttgacccagtctccatcctccctgtctgcatctgtaggagacagagtcaccatcacttgcagggccagtcagagtattggcacaaacatacactggtacctgcagaagccagggcagtctccacagctcctgatctattatgcttctgagtctatctctggggtcccatcaaggttcagcggcagtggatctgggacagatttcactctcaccatcagcagcctgcagcctgaagattttgcaacttattactgtcaacaaaataataactggccaaccacgttcggccaagggaccaaggtggaaatcaaa

SEQ ID NO: 162 - protein, 107 aa, Artificial Sequence
  EP-h2 light chain variable domain amino acid Q100 VEIK
AIQLTQSPSSLSASVGDRVTITCRASQSIGTNIHWYLQKPGQSPQLLIYYASESISGVPSRFSGSGSGTDFTLTISSLQPEDFATYYCQQNNNWPTTFGQGTKVEIK

SEQ ID NO: 163 - protein, 107 aa, Artificial Sequence
  EP-h2 light chain variable domain amino acid A100 LELK
AIQLTQSPSSLSASVGDRVTITCRASQSIGTNIHWYLQKPGQSPQLLIYYASESISGVPSRFSGSGSGTDFTLTISSLQPEDFATYYCQQNNNWPTTFGAGTKLELK

SEQ ID NO: 164 - DNA, 321 bp, Artificial Sequence
  EP-h2 light chain variable domain nucleic acid Q100 LELK
gccatccagttgacccagtctccatcctccctgtctgcatctgtaggagacagagtcaccatcacttgcagggccagtcagagtattggcacaaacatacactggtacctgcagaagccagggcagtctccacagctcctgatctattatgcttctgagtctatctctggggtcccatcaaggttcagcggcagtggatctgggacagatttcactctcaccatcagcagcctgcagcctgaagattttgcaacttattactgtcaacaaaataataactggccaaccacgttcggccaagggaccaagctggagctgaaa

SEQ ID NO: 165 - protein, 107 aa, Artificial Sequence
  EP-h2 light chain variable domain amino acid Q100 LELK
AIQLTQSPSSLSASVGDRVTITCRASQSIGTNIHWYLQKPGQSPQLLIYYASESISGVPSRFSGSGSGTDFTLTISSLQPEDFATYYCQQNNNWPTTFGQGTKLELK

SEQ ID NO: 166 - DNA, 642 bp, Artificial Sequence
  EP-h4 light chain nucleic acid Q100 VEIK
  V_region (1)...(321): variable domain
  C_region (322)...(642): constant domain
gccatccagttgacccagtctccatcctccctgtctgcatctgtaggagacagagtcaccatcacttgcagggccagtcagagtattggcacaaacatacactggtatcagcagaaaccagggaaagctcctaagctcctgatctattatgcttctgagtctatctctggggtcccatcaaggttcagcggcagtggatctgggacagatttcactctcaccatcagcagcctgcagcctgaagattttgcaacttattactgtcaacaaaataataactggccaaccacgttcggccaagggaccaaggtggaaatcaaacgtacggtggctgcaccatctgtcttcatcttcccgccatctgatgagcagttgaaatctggaactgcctctgttgtgtgcctgctgaataacttctatcccagagaggccaaagtacagtggaaggtggataacgccctccaatcgggtaactcccaggagagtgtcacagagcaggacagcaaggacagcacctacagcctcagcagcaccctgacgctgagcaaagcagactacgagaaacacaaagtctacgcctgcgaagtcacccatcagggcctgagctcgcccgtcacaaagagcttcaacaggggagagtgt

SEQ ID NO: 167 - protein, 214 aa, Artificial Sequence
  EP-h4 light chain amino acid Q100 VEIK
  DOMAIN (1)...(107): variable domain
  DOMAIN (108)...(214): constant domain
AIQLTQSPSSLSASVGDRVTITCRASQSIGTNIHWYQQKPGKAPKLLIYYASESISGVPSRFSGSGSGTDFTLTISSLQPEDFATYYCQQNNNWPTTFGQGTKVEIKRTVAAPSVFIFPPSDEQLKSGTASVVCLLNNFYPREAKVQWKVDNALQSGNSQESVTEQDSKDSTYSLSSTLTLSKADYEKHKVYACEVTHQGLSSPVTKSFNRGEC

SEQ ID NO: 168 - DNA, 321 bp, Artificial Sequence
  EP-h4 light chain variable domain nucleic acid Q100 VEIK
gccatccagttgacccagtctccatcctccctgtctgcatctgtaggagacagagtcaccatcacttgcagggccagtcagagtattggcacaaacatacactggtatcagcagaaaccagggaaagctcctaagctcctgatctattatgcttctgagtctatctctggggtcccatcaaggttcagcggcagtggatctgggacagatttcactctcaccatcagcagcctgcagcctgaagattttgcaacttattactgtcaacaaaataataactggccaaccacgttcggccaagggaccaaggtggaaatcaaa

SEQ ID NO: 169 - protein, 107 aa, Artificial Sequence
  EP-h4 light chain variable domain amino acid Q100 VEIK
AIQLTQSPSSLSASVGDRVTITCRASQSIGTNIHWYQQKPGKAPKLLIYYASESISGVPSRFSGSGSGTDFTLTISSLQPEDFATYYCQQNNNWPTTFGQGTKVEIK

SEQ ID NO: 170 - protein, 107 aa, Artificial Sequence
  EP-h4 light chain variable domain amino acid A100 LELK
AIQLTQSPSSLSASVGDRVTITCRASQSIGTNIHWYQQKPGKAPKLLIYYASESISGVPSRFSGSGSGTDFTLTISSLQPEDFATYYCQQNNNWPTTFGAGTKLELK

SEQ ID NO: 171 - DNA, 321 bp, Artificial Sequence
  EP-h4 light chain variable domain nucleic acid Q100 LELK
gccatccagttgacccagtctccatcctccctgtctgcatctgtaggagacagagtcaccatcacttgcagggccagtcagagtattggcacaaacatacactggtatcagcagaaaccagggaaagctcctaagctcctgatctattatgcttctgagtctatctctggggtcccatcaaggttcagcggcagtggatctgggacagatttcactctcaccatcagcagcctgcagcctgaagattttgcaacttattactgtcaacaaaataataactggccaaccacgttcggccaagggaccaagctggagctgaaa

SEQ ID NO: 172 - protein, 107 aa, Artificial Sequence
  EP-h4 light chain variable domain amino acid Q100 LELK
AIQLTQSPSSLSASVGDRVTITCRASQSIGTNIHWYQQKPGKAPKLLIYYASESISGVPSRFSGSGSGTDFTLTISSLQPEDFATYYCQQNNNWPTTFGQGTKLELK

SEQ ID NO: 173 - DNA, 642 bp, Artificial Sequence
  EP-h5 light chain nucleic acid Q100 VEIK
  V_region (1)...(321): variable domain
  C_region (322)...(642): constant domain
gacatccagatgacccagtctccatcctccctgtctgcatctgtaggagacagagtcaccatcacttgcagggccagtcagagtattggcacaaacatacactggtaccagcagaaacctggccaggctcccaggctcctcatctattatgcttctgagtctatctctgggatcccagacaggttcagtggcagtgggtctgggacagacttcactctcaccatcagcagactggagcctgaagattttgcagtgtattactgtcaacaaaataataactggccaaccacgttcggccaagggaccaaggtggaaatcaaacgtacggtggctgcaccatctgtcttcatcttcccgccatctgatgagcagttgaaatctggaactgcctctgttgtgtgcctgctgaataacttctatcccagagaggccaaagtacagtggaaggtggataacgccctccaatcgggtaactcccaggagagtgtcacagagcaggacagcaaggacagcacctacagcctcagcagcaccctgacgctgagcaaagcagactacgagaaacacaaagtctacgcctgcgaagtcacccatcagggcctgagctcgcccgtcacaaagagcttcaacaggggagagtgt

SEQ ID NO: 174 - protein, 214 aa, Artificial Sequence
  EP-h5 light chain amino acid Q100 VEIK
  DOMAIN (1)...(107): variable domain
  DOMAIN (108)...(214): constant domain
DIQMTQSPSSLSASVGDRVTITCRASQSIGTNIHWYQQKPGQAPRLLIYYASESISGIPDRFSGSGSGTDFTLTISRLEPEDFAVYYCQQNNNWPTTFGQGTKVEIKRTVAAPSVFIFPPSDEQLKSGTASVVCLLNNFYPREAKVQWKVDNALQSGNSQESVTEQDSKDSTYSLSSTLTLSKADYEKHKVYACEVTHQGLSSPVTKSFNRGEC

SEQ ID NO: 175 - DNA, 321 bp, Artificial Sequence
  EP-h5 light chain variable domain nucleic acid Q100 VEIK
gacatccagatgacccagtctccatcctccctgtctgcatctgtaggagacagagtcaccatcacttgcagggccagtcagagtattggcacaaacatacactggtaccagcagaaacctggccaggctcccaggctcctcatctattatgcttctgagtctatctctgggatcccagacaggttcagtggcagtgggtctgggacagacttcactctcaccatcagcagactggagcctgaagattttgcagtgtattactgtcaacaaaataataactggccaaccacgttcggccaagggaccaaggtggaaatcaaa

SEQ ID NO: 176 - protein, 107 aa, Artificial Sequence
  EP-h5 light chain variable domain amino acid Q100 VEIK
  DOMAIN (1)...(107): variable domain
  DOMAIN (108)...(214): constant domain
DIQMTQSPSSLSASVGDRVTITCRASQSIGTNIHWYQQKPGQAPRLLIYYASESISGIPDRFSGSGSGTDFTLTISRLEPEDFAVYYCQQNNNWPTTFGQGTKVEIK

SEQ ID NO: 177 - protein, 107 aa, Artificial Sequence
  EP-h5 light chain variable domain amino acid A100 LELK
DIQMTQSPSSLSASVGDRVTITCRASQSIGTNIHWYQQKPGQAPRLLIYYASESISGIPDRFSGSGSGTDFTLTISRLEPEDFAVYYCQQNNNWPTTFGAGTKLELK

SEQ ID NO: 178 - DNA, 321 bp, Artificial Sequence
  EP-h5 light chain variable domain nucleic acid Q100 LELK
gacatccagatgacccagtctccatcctccctgtctgcatctgtaggagacagagtcaccatcacttgcagggccagtcagagtattggcacaaacatacactggtaccagcagaaacctggccaggctcccaggctcctcatctattatgcttctgagtctatctctgggatcccagacaggttcagtggcagtgggtctgggacagacttcactctcaccatcagcagactggagcctgaagattttgcagtgtattactgtcaacaaaataataactggccaaccacgttcggccaagggaccaagctggagctgaaa

SEQ ID NO: 179 - protein, 107 aa, Artificial Sequence
  EP-h5 light chain variable domain amino acid Q100 LELK
DIQMTQSPSSLSASVGDRVTITCRASQSIGTNIHWYQQKPGQAPRLLIYYASESISGIPDRFSGSGSGTDFTLTISRLEPEDFAVYYCQQNNNWPTTFGQGTKLELK

SEQ ID NO: 180 - DNA, 642 bp, Artificial Sequence
  EP-h6, 7, 9 light chain nucleic acid Q100 VEIK
  V_region (1)...(321): variable domain
  C_region (322)...(642): constant domain
gccatccagttgacccagtctccatcctccctgtctgcatctgtaggagacagagtcaccatcacttgcagggccagtcagagtattggcacaaacatacactggtacctgcagaagccagggcagtctccacagctcctgatctattatgcttctgagtctatctctgggatcccagacaggttcagtggcagtgggtctgggacagacttcactctcaccatcagcagactggagcctgaagattttgcagtgtattactgtcaacaaaataataactggccaaccacgttcggccaagggaccaaggtggaaatcaaacgtacggtggctgcaccatctgtcttcatcttcccgccatctgatgagcagttgaaatctggaactgcctctgttgtgtgcctgctgaataacttctatcccagagaggccaaagtacagtggaaggtggataacgccctccaatcgggtaactcccaggagagtgtcacagagcaggacagcaaggacagcacctacagcctcagcagcaccctgacgctgagcaaagcagactacgagaaacacaaagtctacgcctgcgaagtcacccatcagggcctgagctcgcccgtcacaaagagcttcaacaggggagagtgt

SEQ ID NO: 181 - protein, 214 aa, Artificial Sequence
  EP-h6, 7, 9 light chain amino acid Q100 VEIK
  DOMAIN (1)...(107): variable domain
  DOMAIN (108)...(214): constant domain
AIQLTQSPSSLSASVGDRVTITCRASQSIGTNIHWYLQKPGQSPQLLIYYASESISGIPDRFSGSGSGTDFTLTISRLEPEDFAVYYCQQNNNWPTTFGQGTKVEIKRTVAAPSVFIFPPSDEQLKSGTASVVCLLNNFYPREAKVQWKVDNALQSGNSQESVTEQDSKDSTYSLSSTLTLSKADYEKHKVYACEVTHQGLSSPVTKSFNRGEC

SEQ ID NO: 182 - DNA, 321 bp, Artificial Sequence
  EP-h6, 7, 9 light chain variable domain nucleic acid Q100 VEIK
gccatccagttgacccagtctccatcctccctgtctgcatctgtaggagacagagtcaccatcacttgcagggccagtcagagtattggcacaaacatacactggtacctgcagaagccagggcagtctccacagctcctgatctattatgcttctgagtctatctctgggatcccagacaggttcagtggcagtgggtctgggacagacttcactctcaccatcagcagactggagcctgaagattttgcagtgtattactgtcaacaaaataataactggccaaccacgttcggccaagggaccaaggtggaaatcaaa

SEQ ID NO: 183 - protein, 107 aa, Artificial Sequence
  EP-h6, 7, 9 light chain variable domain amino acid Q100 VEIK
AIQLTQSPSSLSASVGDRVTITCRASQSIGTNIHWYLQKPGQSPQLLIYYASESISGIPDRFSGSGSGTDFTLTISRLEPEDFAVYYCQQNNNWPTTFGQGTKVEIK

SEQ ID NO: 184 - protein, 107 aa, Artificial Sequence
  EP-h6, 7, 9 light chain variable domain amino acid A100 LELK
AIQLTQSPSSLSASVGDRVTITCRASQSIGTNIHWYLQKPGQSPQLLIYYASESISGIPDRFSGSGSGTDFTLTISRLEPEDFAVYYCQQNNNWPTTFGAGTKLELK

SEQ ID NO: 185 - DNA, 321 bp, Artificial Sequence
  EP-h6, 7, 9 light chain variable domain nucleic acid Q100 LELK
gccatccagttgacccagtctccatcctccctgtctgcatctgtaggagacagagtcaccatcacttgcagggccagtcagagtattggcacaaacatacactggtacctgcagaagccagggcagtctccacagctcctgatctattatgcttctgagtctatctctgggatcccagacaggttcagtggcagtgggtctgggacagacttcactctcaccatcagcagactggagcctgaagattttgcagtgtattactgtcaacaaaataataactggccaaccacgttcggccaagggaccaagctggagctgaaa

SEQ ID NO: 186 - protein, 107 aa, Artificial Sequence
  EP-h6, 7, 9 light chain variable domain amino acid Q100 LELK
AIQLTQSPSSLSASVGDRVTITCRASQSIGTNIHWYLQKPGQSPQLLIYYASESISGIPDRFSGSGSGTDFTLTISRLEPEDFAVYYCQQNNNWPTTFGQGTKLELK

SEQ ID NO: 187 - DNA, 642 bp, Artificial Sequence
  EP-h8 light chain nucleic acid Q100 VEIK
  V_region (1)...(321)
  C_region (322)...(642)
gccatccagttgacccagtctccatcctccctgtctgcatctgtaggagacagagtcaccatcacttgcagggccagtcagagtattggcacaaacatacactggtaccagcagaaacctggccaggctcccaggctcctcatctattatgcttctgagtctatctctgggatcccagccaggttcagtggcagtgggtctgggacagagttcactctcaccatcagcagcctgcagtctgaagattttgcagtttattactgtcaacaaaataataactggccaaccacgttcggccaagggaccaaggtggaaatcaaacgtacggtggctgcaccatctgtcttcatcttcccgccatctgatgagcagttgaaatctggaactgcctctgttgtgtgcctgctgaataacttctatcccagagaggccaaagtacagtggaaggtggataacgccctccaatcgggtaactcccaggagagtgtcacagagcaggacagcaaggacagcacctacagcctcagcagcaccctgacgctgagcaaagcagactacgagaaacacaaagtctacgcctgcgaagtcacccatcagggcctgagctcgcccgtcacaaagagcttcaacaggggagagtgt

SEQ ID NO: 188 - protein, 214 aa, Artificial Sequence
  EP-h8 light chain amino acid Q100 VEIK
  DOMAIN (1)...(107): variable domain
  DOMAIN (108)...(214): constant domain
AIQLTQSPSSLSASVGDRVTITCRASQSIGTNIHWYQQKPGQAPRLLIYYASESISGIPARFSGSGSGTEFTLTISSLQSEDFAVYYCQQNNNWPTTFGQGTKVEIKRTVAAPSVFIFPPSDEQLKSGTASVVCLLNNFYPREAKVQWKVDNALQSGNSQESVTEQDSKDSTYSLSSTLTLSKADYEKHKVYACEVTHQGLSSPVTKSFNRGEC

SEQ ID NO: 189 - DNA, 321 bp, Artificial Sequence
  EP-h8 light chain variable domain nucleic acid Q100 VEIK
gccatccagttgacccagtctccatcctccctgtctgcatctgtaggagacagagtcaccatcacttgcagggccagtcagagtattggcacaaacatacactggtaccagcagaaacctggccaggctcccaggctcctcatctattatgcttctgagtctatctctgggatcccagccaggttcagtggcagtgggtctgggacagagttcactctcaccatcagcagcctgcagtctgaagattttgcagtttattactgtcaacaaaataataactggccaaccacgttcggccaagggaccaaggtggaaatcaaa

SEQ ID NO: 190 - protein, 107 aa, Artificial Sequence
  EP-h8 light chain variable domain amino acid Q100 VEIK
AIQLTQSPSSLSASVGDRVTITCRASQSIGTNIHWYQQKPGQAPRLLIYYASESISGIPARFSGSGSGTEFTLTISSLQSEDFAVYYCQQNNNWPTTFGQGTKVEIK

SEQ ID NO: 191 - protein, 107 aa, Artificial Sequence
  EP-h8 light chain variable domain amino acid A100 LELK
AIQLTQSPSSLSASVGDRVTITCRASQSIGTNIHWYQQKPGQAPRLLIYYASESISGIPARFSGSGSGTEFTLTISSLQSEDFAVYYCQQNNNWPTTFGAGTKLELK

SEQ ID NO: 192 - DNA, 321 bp, Artificial Sequence
  EP-h8 light chain variable domain nucleic acid Q100 LELK
gccatccagttgacccagtctccatcctccctgtctgcatctgtaggagacagagtcaccatcacttgcagggccagtcagagtattggcacaaacatacactggtaccagcagaaacctggccaggctcccaggctcctcatctattatgcttctgagtctatctctgggatcccagccaggttcagtggcagtgggtctgggacagagttcactctcaccatcagcagcctgcagtctgaagattttgcagtttattactgtcaacaaaataataactggccaaccacgttcggccaagggaccaagctggagctgaaa

SEQ ID NO: 193 - protein, 107 aa, Artificial Sequence
  EP-h8 light chain variable domain amino acid Q100 LELK
AIQLTQSPSSLSASVGDRVTITCRASQSIGTNIHWYQQKPGQAPRLLIYYASESISGIPARFSGSGSGTEFTLTISSLQSEDFAVYYCQQNNNWPTTFGQGTKLELK

SEQ ID NO: 194 - DNA, 642 bp, Artificial Sequence
  EP-h10, 12 light chain nucleic acid Q100 VEIK
  V_region (1)...(321)
  C_region (322)...(642)
gaaattgtgttgacacagtctccagccaccctgtctttgtctccaggggaaagagccaccctctcctgcagggccagtcagagtattggcacaaacatacactggtatcagcagaaaccagggaaagctcctaagctcctgatctattatgcttctgagtctatctctgggatcccagacaggttcagtggcagtgggtctgggacagacttcactctcaccatcagcagactggagcctgaagattttgcagtgtattactgtcaacaaaataataactggccaaccacgttcggccaagggaccaaggtggaaatcaaacgtacggtggctgcaccatctgtcttcatcttcccgccatctgatgagcagttgaaatctggaactgcctctgttgtgtgcctgctgaataacttctatcccagagaggccaaagtacagtggaaggtggataacgccctccaatcgggtaactcccaggagagtgtcacagagcaggacagcaaggacagcacctacagcctcagcagcaccctgacgctgagcaaagcagactacgagaaacacaaagtctacgcctgcgaagtcacccatcagggcctgagctcgcccgtcacaaagagcttcaacaggggagagtgt

SEQ ID NO: 195 - protein, 214 aa, Artificial Sequence
  EP-h10, 12 light chain amino acid Q100 VEIK
  DOMAIN (1)...(107): variable domain
  DOMAIN (108)...(214): constant domain
EIVLTQSPATLSLSPGERATLSCRASQSIGTNIHWYQQKPGKAPKLLIYYASESISGIPDRFSGSGSGTDFTLTISRLEPEDFAVYYCQQNNNWPTTFGQGTKVEIKRTVAAPSVFIFPPSDEQLKSGTASVVCLLNNFYPREAKVQWKVDNALQSGNSQESVTEQDSKDSTYSLSSTLTLSKADYEKHKVYACEVTHQGLSSPVTKSFNRGEC

SEQ ID NO: 196 - DNA, 321 bp, Artificial Sequence
  EP-h10, 12 light chain variable domain nucleic acid Q100 VEIK
gaaattgtgttgacacagtctccagccaccctgtctttgtctccaggggaaagagccaccctctcctgcagggccagtcagagtattggcacaaacatacactggtatcagcagaaaccagggaaagctcctaagctcctgatctattatgcttctgagtctatctctgggatcccagacaggttcagtggcagtgggtctgggacagacttcactctcaccatcagcagactggagcctgaagattttgcagtgtattactgtcaacaaaataataactggccaaccacgttcggccaagggaccaaggtggaaatcaaa

SEQ ID NO: 197 - protein, 107 aa, Artificial Sequence
  EP-h10, 12 light chain variable domain amino acid Q100 VEIK
EIVLTQSPATLSLSPGERATLSCRASQSIGTNIHWYQQKPGKAPKLLIYYASESISGIPDRFSGSGSGTDFTLTISRLEPEDFAVYYCQQNNNWPTTFGQGTKVEIK

SEQ ID NO: 198 - protein, 107 aa, Artificial Sequence
  EP-h10, 12 light chain variable domain amino acid A100 LELK
EIVLTQSPATLSLSPGERATLSCRASQSIGTNIHWYQQKPGKAPKLLIYYASESISGIPDRFSGSGSGTDFTLTISRLEPEDFAVYYCQQNNNWPTTFGAGTKLELK

SEQ ID NO: 199 - DNA, 321 bp, Artificial Sequence
  EP-h10, 12 light chain variable domain nucleic acid Q100 LELK
gaaattgtgttgacacagtctccagccaccctgtctttgtctccaggggaaagagccaccctctcctgcagggccagtcagagtattggcacaaacatacactggtatcagcagaaaccagggaaagctcctaagctcctgatctattatgcttctgagtctatctctgggatcccagacaggttcagtggcagtgggtctgggacagacttcactctcaccatcagcagactggagcctgaagattttgcagtgtattactgtcaacaaaataataactggccaaccacgttcggccaagggaccaagctggagctgaaa

SEQ ID NO: 200 - protein, 107 aa, Artificial Sequence
  EP-h10, 12 light chain variable domain amino acid Q100 LELK
EIVLTQSPATLSLSPGERATLSCRASQSIGTNIHWYQQKPGKAPKLLIYYASESISGIPDRFSGSGSGTDFTLTISRLEPEDFAVYYCQQNNNWPTTFGQGTKLELK

SEQ ID NO: 201 - DNA, 642 bp, Artificial Sequence
  EP-h13, 14 light chain nucleic acid Q100 VEIK
  V_region (1)...(321)
  C_region (322)...(642)
gaaattgtgttgacacagtctccagccaccctgtctttgtctccaggggaaagagccaccctctcctgcagggccagtcagagtattggcacaaacatacactggtaccagcagaaacctggccaggctcccaggctcctcatctattatgcttctgagtctatctctggggtcccatcaaggttcagcggcagtggatctgggacagaattcactctcaccatcagcagcctgcagcctgatgattttgcaacttattactgtcaacaaaataataactggccaaccacgttcggccaagggaccaaggtggaaatcaaacgtacggtggctgcaccatctgtcttcatcttcccgccatctgatgagcagttgaaatctggaactgcctctgttgtgtgcctgctgaataacttctatcccagagaggccaaagtacagtggaaggtggataacgccctccaatcgggtaactcccaggagagtgtcacagagcaggacagcaaggacagcacctacagcctcagcagcaccctgacgctgagcaaagcagactacgagaaacacaaagtctacgcctgcgaagtcacccatcagggcctgagctcgcccgtcacaaagagcttcaacaggggagagtgt

SEQ ID NO: 202 - protein, 214 aa, Artificial Sequence
  EP-h13, 14 light chain amino acid Q100 VEIK
  DOMAIN (1)...(107): variable domain
  DOMAIN (108)...(214): constant domain
EIVLTQSPATLSLSPGERATLSCRASQSIGTNIHWYQQKPGQAPRLLIYYASESISGVPSRFSGSGSGTEFTLTISSLQPDDFATYYCQQNNNWPTTFGQGTKVEIKRTVAAPSVFIFPPSDEQLKSGTASVVCLLNNFYPREAKVQWKVDNALQSGNSQESVTEQDSKDSTYSLSSTLTLSKADYEKHKVYACEVTHQGLSSPVTKSFNRGEC

SEQ ID NO: 203 - DNA, 321 bp, Artificial Sequence
  EP-h13, 14 light chain variable domain nucleic acid Q100 VEIK
gaaattgtgttgacacagtctccagccaccctgtctttgtctccaggggaaagagccaccctctcctgcagggccagtcagagtattggcacaaacatacactggtaccagcagaaacctggccaggctcccaggctcctcatctattatgcttctgagtctatctctggggtcccatcaaggttcagcggcagtggatctgggacagaattcactctcaccatcagcagcctgcagcctgatgattttgcaacttattactgtcaacaaaataataactggccaaccacgttcggccaagggaccaaggtggaaatcaaa

SEQ ID NO: 204 - protein, 107 aa, Artificial Sequence
  EP-h13, 14 light chain variable domain amino acid Q100 VEIK
EIVLTQSPATLSLSPGERATLSCRASQSIGTNIHWYQQKPGQAPRLLIYYASESISGVPSRFSGSGSGTEFTLTISSLQPDDFATYYCQQNNNWPTTFGQGTKVEIK

SEQ ID NO: 205 - protein, 107 aa, Artificial Sequence
  EP-h13, 14 light chain variable domain amino acid A100 LELK
EIVLTQSPATLSLSPGERATLSCRASQSIGTNIHWYQQKPGQAPRLLIYYASESISGVPSRFSGSGSGTEFTLTISSLQPDDFATYYCQQNNNWPTTFGAGTKLELK

SEQ ID NO: 206 - DNA, 321 bp, Artificial Sequence
  EP-h13, 14 light chain variable domain nucleic acid Q100 LELK
gaaattgtgttgacacagtctccagccaccctgtctttgtctccaggggaaagagccaccctctcctgcagggccagtcagagtattggcacaaacatacactggtaccagcagaaacctggccaggctcccaggctcctcatctattatgcttctgagtctatctctggggtcccatcaaggttcagcggcagtggatctgggacagaattcactctcaccatcagcagcctgcagcctgatgattttgcaacttattactgtcaacaaaataataactggccaaccacgttcggccaagggaccaagctggagctgaaa

SEQ ID NO: 207 - protein, 107 aa, Artificial Sequence
  EP-h13, 14 light chain variable domain amino acid Q100 LELK
EIVLTQSPATLSLSPGERATLSCRASQSIGTNIHWYQQKPGQAPRLLIYYASESISGVPSRFSGSGSGTEFTLTISSLQPDDFATYYCQQNNNWPTTFGQGTKLELK

SEQ ID NO: 208 - DNA, 1347 bp, Artificial Sequence
  FEP-h1, 19, 20, 21 heavy chain nucleic acid S119
  variation 312: n = a or g
  V_region (1)...(357)
  C_region (358)...(1347)
gaggtccagctggtacagtctggggctgaggtgaagaagcctggggctacagtgaaaatctcctgcaaggtttctggtttctcattatttaactatggtgtacactggatccgccagcccccagggaaggggctggagtggattggtgtgatatggagtggtggaaacacagactataatacacctttcacatccagattcaccatctccagagacaattccaagaacacgctgtatcttcaaatgaacagcctgagagccgaggacacggccgtgtattactgtgccagagccctcacctactatgatgangagtttgcttactggggccctggaacgctggtcaccgtcagctcagcctccaccaagggcccatcggtcttccccctggcaccctcctccaagagcacctctgggggcacagcggccctgggctgcctggtcaaggactacttccccgaaccggtgacggtgtcgtggaactcaggcgccctgaccagcggcgtgcacaccttcccggctgtcctacagtcctcaggactctactccctcagcagcgtggtgaccgtgccctccagcagcttgggcacccagacctacatctgcaacgtgaatcacaagcccagcaacaccaaggtggacaagaaagttgagcccaaatcttgtgacaaaactcacacatgcccaccgtgcccagcacctgaactcctggggggaccgtcagtcttcctcttccccccaaaacccaaggacaccctcatgatctcccggacccctgaggtcacatgcgtggtggtggacgtgagccacgaagaccctgaggtcaagttcaactggtacgtggacggcgtggaggtgcataatgccaagacaaagccgcgggaggagcagtacaacagcacgtaccgtgtggtcagcgtcctcaccgtcctgcaccaggactggctgaatggcaaggagtacaagtgcaaggtcagcaacaaagccctcccagcccccatcgagaaaaccatctccaaagccaaagggcagccccgagaaccacaggtgtacaccctgcccccatcccgggatgagctgaccaagaaccaggtcagcctgacctgcctggtcaaaggcttctatcccagcgacatcgccgtggagtgggagagcaatgggcagccggagaacaactacaagaccacgcctcccgtgctggactccgacggctccttcttcctctacagcaagctcaccgtggacaagagcaggtggcagcaggggaacgtcttctcatgctccgtgatgcatgaggctctgcacaaccactacacgcagaagagcctctccctgtctccgggtaaa

SEQ ID NO: 209 - protein, 449 aa, Artificial Sequence
  FEP-h1, 19, 20, 21 heavy chain amino acid S119
  DOMAIN (1)...(119): variable domain
  DOMAIN (120)...(217): CH1
  DOMAIN (218)...(232): hinge region
  DOMAIN (233)...(342): CH2
  DOMAIN (343)...(449): CH3
EVQLVQSGAEVKKPGATVKISCKVSGFSLFNYGVHWIRQPPGKGLEWIGVIWSGGNTDYNTPFTSRFTISRDNSKNTLYLQMNSLRAEDTAVYYCARALTYYDEEFAYWGPGTLVTVSSASTKGPSVFPLAPSSKSTSGGTAALGCLVKDYFPEPVTVSWNSGALTSGVHTFPAVLQSSGLYSLSSVVTVPSSSLGTQTYICNVNHKPSNTKVDKKVEPKSCDKTHTCPPCPAPELLGGPSVFLFPPKPKDTLMISRTPEVTCVVVDVSHEDPEVKFNWYVDGVEVHNAKTKPREEQYNSTYRVVSVLTVLHQDWLNGKEYKCKVSNKALPAPIEKTISKAKGQPREPQVYTLPPSRDELTKNQVSLTCLVKGFYPSDIAVEWESNGQPENNYKTTPPVLDSDGSFFLYSKLTVDKSRWQQGNVFSCSVMHEALHNHYTQKSLSLSPGK

SEQ ID NO: 210 - DNA, 357 bp, Artificial Sequence
  FEP-h1, 19, 20, 21 heavy chain variable domain nucleic acid S119
  variation 312: n = a or g
gaggtccagctggtacagtctggggctgaggtgaagaagcctggggctacagtgaaaatctcctgcaaggtttctggtttctcattatttaactatggtgtacactggatccgccagcccccagggaaggggctggagtggattggtgtgatatggagtggtggaaacacagactataatacacctttcacatccagattcaccatctccagagacaattccaagaacacgctgtatcttcaaatgaacagcctgagagccgaggacacggccgtgtattactgtgccagagccctcacctactatgatgangagtttgcttactggggccctggaacgctggtcaccgtcagctca

SEQ ID NO: 211 - protein, 119 aa, Artificial Sequence
  FEP-h1, 19, 20, 21 heavy chain variable domain amino acid S119
EVQLVQSGAEVKKPGATVKISCKVSGFSLFNYGVHWIRQPPGKGLEWIGVIWSGGNTDYNTPFTSRFTISRDNSKNTLYLQMNSLRAEDTAVYYCARALTYYDEEFAYWGPGTLVTVSS

SEQ ID NO: 212 - DNA, 357 bp, Artificial Sequence
  FEP-h1, 19, 20, 21 heavy chain variable domain nucleic acid A119
  variation 312: n = a or g
gaggtccagctggtacagtctggggctgaggtgaagaagcctggggctacagtgaaaatctcctgcaaggtttctggtttctcattatttaactatggtgtacactggatccgccagcccccagggaaggggctggagtggattggtgtgatatggagtggtggaaacacagactataatacacctttcacatccagattcaccatctccagagacaattccaagaacacgctgtatcttcaaatgaacagcctgagagccgaggacacggccgtgtattactgtgccagagccctcacctactatgatgangagtttgcttactggggccctggaacgctggtcaccgtcagcgca

SEQ ID NO: 213 - protein, 119 aa, Artificial Sequence
  FEP-h1, 19, 20, 21 heavy chain variable domain amino acid A119
EVQLVQSGAEVKKPGATVKISCKVSGFSLFNYGVHWIRQPPGKGLEWIGVIWSGGNTDYNTPFTSRFTISRDNSKNTLYLQMNSLRAEDTAVYYCARALTYYDEEFAYWGPGTLVTVSA

SEQ ID NO: 214 - DNA, 1347 bp, Artificial Sequence
  FEP-h2 heavy chain nucleic acid S119
  variation 312: n = a or g
  V_region (1)...(357)
  C_region (368)...(1347)
gaggtccagctggtacagtctggggctgaggtgaagaagcctggggctacagtgaaaatctcctgcaaggtttctggtttctcattatttaactatggtgtacactgggtgcgacaggctcgtggacaacgccttgagtggataggtgtgatatggagtggtggaaacacagactataatacacctttcacatccagattcaccatctccagagatgattcaaagaacacggcgtatctgcaaatgaacagcctgaaaaccgaggacacggccgtgtattactgtgccagagccctcacctactatgatgangagtttgcttactggggccctggaacgctggtcaccgtcagctcagcctccaccaagggcccatcggtcttccccctggcaccctcctccaagagcacctctgggggcacagcggccctgggctgcctggtcaaggactacttccccgaaccggtgacggtgtcgtggaactcaggcgccctgaccagcggcgtgcacaccttcccggctgtcctacagtcctcaggactctactccctcagcagcgtggtgaccgtgccctccagcagcttgggcacccagacctacatctgcaacgtgaatcacaagcccagcaacaccaaggtggacaagaaagttgagcccaaatcttgtgacaaaactcacacatgcccaccgtgcccagcacctgaactcctggggggaccgtcagtcttcctcttccccccaaaacccaaggacaccctcatgatctcccggacccctgaggtcacatgcgtggtggtggacgtgagccacgaagaccctgaggtcaagttcaactggtacgtggacggcgtggaggtgcataatgccaagacaaagccgcgggaggagcagtacaacagcacgtaccgtgtggtcagcgtcctcaccgtcctgcaccaggactggctgaatggcaaggagtacaagtgcaaggtcagcaacaaagccctcccagcccccatcgagaaaaccatctccaaagccaaagggcagccccgagaaccacaggtgtacaccctgcccccatcccgggatgagctgaccaagaaccaggtcagcctgacctgcctggtcaaaggcttctatcccagcgacatcgccgtggagtgggagagcaatgggcagccggagaacaactacaagaccacgcctcccgtgctggactccgacggctccttcttcctctacagcaagctcaccgtggacaagagcaggtggcagcaggggaacgtcttctcatgctccgtgatgcatgaggctctgcacaaccactacacgcagaagagcctctccctgtctccgggtaaa

SEQ ID NO: 215 - protein, 449 aa, Artificial Sequence
  FEP-h2 heavy chain amino acid S119
  DOMAIN (1)...(119): variable domain
  DOMAIN (120)...(217): CH1
  DOMAIN (218)...(232): hinge region
  DOMAIN (233)...(342): CH2
  DOMAIN (343)...(449): CH3
EVQLVQSGAEVKKPGATVKISCKVSGFSLFNYGVHWVRQARGQRLEWIGVIWSGGNTDYNTPFTSRFTISRDDSKNTAYLQMNSLKTEDTAVYYCARALTYYDEEFAYWGPGTLVTVSSASTKGPSVFPLAPSSKSTSGGTAALGCLVKDYFPEPVTVSWNSGALTSGVHTFPAVLQSSGLYSLSSVVTVPSSSLGTQTYICNVNHKPSNTKVDKKVEPKSCDKTHTCPPCPAPELLGGPSVFLFPPKPKDTLMISRTPEVTCVVVDVSHEDPEVKFNWYVDGVEVHNAKTKPREEQYNSTYRVVSVLTVLHQDWLNGKEYKCKVSNKALPAPIEKTISKAKGQPREPQVYTLPPSRDELTKNQVSLTCLVKGFYPSDIAVEWESNGQPENNYKTTPPVLDSDGSFFLYSKLTVDKSRWQQGNVFSCSVMHEALHNHYTQKSLSLSPGK

SEQ ID NO: 216 - DNA, 357 bp, Artificial Sequence
  FEP-h2 heavy chain variable domain nucleic acid S119
  variation 312: n = a or g
gaggtccagctggtacagtctggggctgaggtgaagaagcctggggctacagtgaaaatctcctgcaaggtttctggtttctcattatttaactatggtgtacactgggtgcgacaggctcgtggacaacgccttgagtggataggtgtgatatggagtggtggaaacacagactataatacacctttcacatccagattcaccatctccagagatgattcaaagaacacggcgtatctgcaaatgaacagcctgaaaaccgaggacacggccgtgtattactgtgccagagccctcacctactatgatgangagtttgcttactggggccctggaacgctggtcaccgtcagctca

SEQ ID NO: 217 - protein, 119 aa, Artificial Sequence
  FEP-h2 heavy chain variable domain amino acid S119
EVQLVQSGAEVKKPGATVKISCKVSGFSLFNYGVHWVRQARGQRLEWIGVIWSGGNTDYNTPFTSRFTISRDDSKNTAYLQMNSLKTEDTAVYYCARALTYYDEEFAYWGPGTLVTVSS

SEQ ID NO: 218 - DNA, 357 bp, Artificial Sequence
  FEP-h2 heavy chain variable domain nucleic acid A119
  variation 312: n = a or g
gaggtccagctggtacagtctggggctgaggtgaagaagcctggggctacagtgaaaatctcctgcaaggtttctggtttctcattatttaactatggtgtacactgggtgcgacaggctcgtggacaacgccttgagtggataggtgtgatatggagtggtggaaacacagactataatacacctttcacatccagattcaccatctccagagatgattcaaagaacacggcgtatctgcaaatgaacagcctgaaaaccgaggacacggccgtgtattactgtgccagagccctcacctactatgatgangagtttgcttactggggccctggaacgctggtcaccgtcagcgca

SEQ ID NO: 219 - protein, 119 aa, Artificial Sequence
  FEP-h2 heavy chain variable domain amino acid A119
EVQLVQSGAEVKKPGATVKISCKVSGFSLFNYGVHWVRQARGQRLEWIGVIWSGGNTDYNTPFTSRFTISRDDSKNTAYLQMNSLKTEDTAVYYCARALTYYDEEFAYWGPGTLVTVSA

SEQ ID NO: 220 - DNA, 1347 bp, Artificial Sequence
  FEP-h3, 7, 11, 15 heavy chain nucleic acid S119
  variation 312: n = a or g
  V_region (1)...(357)
  C_region (358)...(1347)
gaggtccagctggtacagtctggggctgaggtgaagaagcctggggctacagtgaaaatctcctgcaaggtttctggtttctcattatttaactatggtgtacactgggtgcgacaggccactggacaagggcttgagtggatgggtgtgatatggagtggtggaaacacagactataatacacctttcacatccagattcaccatctccagagatgattcaaagaacacggcgtatctgcaaatgaacagcctgaaaaccgaggacacggccgtgtattactgtgccagagccctcacctactatgatgangagtttgcttactggggccctggaacgctggtcaccgtcagctcagcctccaccaagggcccatcggtcttccccctggcaccctcctccaagagcacctctgggggcacagcggccctgggctgcctggtcaaggactacttccccgaaccggtgacggtgtcgtggaactcaggcgccctgaccagcggcgtgcacaccttcccggctgtcctacagtcctcaggactctactccctcagcagcgtggtgaccgtgccctccagcagcttgggcacccagacctacatctgcaacgtgaatcacaagcccagcaacaccaaggtggacaagaaagttgagcccaaatcttgtgacaaaactcacacatgcccaccgtgcccagcacctgaactcctggggggaccgtcagtcttcctcttccccccaaaacccaaggacaccctcatgatctcccggacccctgaggtcacatgcgtggtggtggacgtgagccacgaagaccctgaggtcaagttcaactggtacgtggacggcgtggaggtgcataatgccaagacaaagccgcgggaggagcagtacaacagcacgtaccgtgtggtcagcgtcctcaccgtcctgcaccaggactggctgaatggcaaggagtacaagtgcaaggtcagcaacaaagccctcccagcccccatcgagaaaaccatctccaaagccaaagggcagccccgagaaccacaggtgtacaccctgcccccatcccgggatgagctgaccaagaaccaggtcagcctgacctgcctggtcaaaggcttctatcccagcgacatcgccgtggagtgggagagcaatgggcagccggagaacaactacaagaccacgcctcccgtgctggactccgacggctccttcttcctctacagcaagctcaccgtggacaagagcaggtggcagcaggggaacgtcttctcatgctccgtgatgcatgaggctctgcacaaccactacacgcagaagagcctctccctgtctccgggtaaa

SEQ ID NO: 221 - protein, 449 aa, Artificial Sequence
  FEP-h3, 7, 11, 15 heavy chain amino acid S119
  DOMAIN (1)...(119): variable domain
  DOMAIN (120)...(217): CH1
  DOMAIN (218)...(232): hinge region
  DOMAIN (233)...(342): CH2
  DOMAIN (343)...(449): CH3
EVQLVQSGAEVKKPGATVKISCKVSGFSLFNYGVHWVRQATGQGLEWMGVIWSGGNTDYNTPFTSRFTISRDDSKNTAYLQMNSLKTEDTAVYYCARALTYYDEEFAYWGPGTLVTVSSASTKGPSVFPLAPSSKSTSGGTAALGCLVKDYFPEPVTVSWNSGALTSGVHTFPAVLQSSGLYSLSSVVTVPSSSLGTQTYICNVNHKPSNTKVDKKVEPKSCDKTHTCPPCPAPELLGGPSVFLFPPKPKDTLMISRTPEVTCVVVDVSHEDPEVKFNWYVDGVEVHNAKTKPREEQYNSTYRVVSVLTVLHQDWLNGKEYKCKVSNKALPAPIEKTISKAKGQPREPQVYTLPPSRDELTKNQVSLTCLVKGFYPSDIAVEWESNGQPENNYKTTPPVLDSDGSFFLYSKLTVDKSRWQQGNVFSCSVMHEALHNHYTQKSLSLSPGK

SEQ ID NO: 222 - DNA, 357 bp, Artificial Sequence
  FEP-h3, 7, 11, 15 heavy chain variable domain nucleic acid S119
  variation 312: n = a or g
gaggtccagctggtacagtctggggctgaggtgaagaagcctggggctacagtgaaaatctcctgcaaggtttctggtttctcattatttaactatggtgtacactgggtgcgacaggccactggacaagggcttgagtggatgggtgtgatatggagtggtggaaacacagactataatacacctttcacatccagattcaccatctccagagatgattcaaagaacacggcgtatctgcaaatgaacagcctgaaaaccgaggacacggccgtgtattactgtgccagagccctcacctactatgatgangagtttgcttactggggccctggaacgctggtcaccgtcagctca

SEQ ID NO: 223 - protein, 119 aa, Artificial Sequence
  FEP-h3, 7, 11, 15 heavy chain variable domain amino acid S119
EVQLVQSGAEVKKPGATVKISCKVSGFSLFNYGVHWVRQATGQGLEWMGVIWSGGNTDYNTPFTSRFTISRDDSKNTAYLQMNSLKTEDTAVYYCARALTYYDEEFAYWGPGTLVTVSS

SEQ ID NO: 224 - DNA, 357 bp, Artificial Sequence
  FEP-h3, 7, 11, 15 heavy chain variable domain nucleic acid A119
  variation 312: n = a or g
gaggtccagctggtacagtctggggctgaggtgaagaagcctggggctacagtgaaaatctcctgcaaggtttctggtttctcattatttaactatggtgtacactgggtgcgacaggccactggacaagggcttgagtggatgggtgtgatatggagtggtggaaacacagactataatacacctttcacatccagattcaccatctccagagatgattcaaagaacacggcgtatctgcaaatgaacagcctgaaaaccgaggacacggccgtgtattactgtgccagagccctcacctactatgatgangagtttgcttactggggccctggaacgctggtcaccgtcagcgca

SEQ ID NO: 225 - protein, 119 aa, Artificial Sequence
  FEP-h3, 7, 11, 15 heavy chain variable domain amino acid A119
EVQLVQSGAEVKKPGATVKISCKVSGFSLFNYGVHWVRQATGQGLEWMGVIWSGGNTDYNTPFTSRFTISRDDSKNTAYLQMNSLKTEDTAVYYCARALTYYDEEFAYWGPGTLVTVSA

SEQ ID NO: 226 - DNA, 1347 bp, Artificial Sequence
  FEP-h4, 8, 12, 16 heavy chain nucleic acid S119
  variation 312: n = a or g
  V_region (1)...(357)
  C_region (358)...(1347)
caggtacagctgcagcagtcaggtccaggactggtgaagccctcgcagaccctctcactcacctgtgccatctctggtttctcattatttaactatggtgtacactggatcaggcagtccccatcgagaggccttgagtggctgggtgtgatatggagtggtggaaacacagactataatacacctttcacatccagactcaccatctccaaggacacctccaaaaaccaggtggtccttacaatgaccaacatggaccctgtggacacagccacgtattactgtgccagagccctcacctactatgatgangagtttgcttactggggccctggaacgctggtcaccgtcagctcagcctccaccaagggcccatcggtcttccccctggcaccctcctccaagagcacctctgggggcacagcggccctgggctgcctggtcaaggactacttccccgaaccggtgacggtgtcgtggaactcaggcgccctgaccagcggcgtgcacaccttcccggctgtcctacagtcctcaggactctactccctcagcagcgtggtgaccgtgccctccagcagcttgggcacccagacctacatctgcaacgtgaatcacaagcccagcaacaccaaggtggacaagaaagttgagcccaaatcttgtgacaaaactcacacatgcccaccgtgcccagcacctgaactcctggggggaccgtcagtcttcctcttccccccaaaacccaaggacaccctcatgatctcccggacccctgaggtcacatgcgtggtggtggacgtgagccacgaagaccctgaggtcaagttcaactggtacgtggacggcgtggaggtgcataatgccaagacaaagccgcgggaggagcagtacaacagcacgtaccgtgtggtcagcgtcctcaccgtcctgcaccaggactggctgaatggcaaggagtacaagtgcaaggtcagcaacaaagccctcccagcccccatcgagaaaaccatctccaaagccaaagggcagccccgagaaccacaggtgtacaccctgcccccatcccgggatgagctgaccaagaaccaggtcagcctgacctgcctggtcaaaggcttctatcccagcgacatcgccgtggagtgggagagcaatgggcagccggagaacaactacaagaccacgcctcccgtgctggactccgacggctccttcttcctctacagcaagctcaccgtggacaagagcaggtggcagcaggggaacgtcttctcatgctccgtgatgcatgaggctctgcacaaccactacacgcagaagagcctctccctgtctccgggtaaa

SEQ ID NO: 227 - protein, 449 aa, Artificial Sequence
  FEP-h4, 8, 12, 16 heavy chain amino acid S119
  DOMAIN (1)...(119): variable domain
  DOMAIN (120)...(217): CH1
  DOMAIN (218)...(232): hinge region
  DOMAIN (233)...(342): CH2
  DOMAIN (343)...(449): CH3
QVQLQQSGPGLVKPSQTLSLTCAISGFSLFNYGVHWIRQSPSRGLEWLGVIWSGGNTDYNTPFTSRLTISKDTSKNQVVLTMTNMDPVDTATYYCARALTYYDEEFAYWGPGTLVTVSSASTKGPSVFPLAPSSKSTSGGTAALGCLVKDYFPEPVTVSWNSGALTSGVHTFPAVLQSSGLYSLSSVVTVPSSSLGTQTYICNVNHKPSNTKVDKKVEPKSCDKTHTCPPCPAPELLGGPSVFLFPPKPKDTLMISRTPEVTCVVVDVSHEDPEVKFNWYVDGVEVHNAKTKPREEQYNSTYRVVSVLTVLHQDWLNGKEYKCKVSNKALPAPIEKTISKAKGQPREPQVYTLPPSRDELTKNQVSLTCLVKGFYPSDIAVEWESNGQPENNYKTTPPVLDSDGSFFLYSKLTVDKSRWQQGNVFSCSVMHEALHNHYTQKSLSLSPGK

SEQ ID NO: 228 - DNA, 357 bp, Artificial Sequence
  FEP-h4, 8, 12, 16 heavy chain variable domain nucleic acid S119
  variation 312: n = a or g
caggtacagctgcagcagtcaggtccaggactggtgaagccctcgcagaccctctcactcacctgtgccatctctggtttctcattatttaactatggtgtacactggatcaggcagtccccatcgagaggccttgagtggctgggtgtgatatggagtggtggaaacacagactataatacacctttcacatccagactcaccatctccaaggacacctccaaaaaccaggtggtccttacaatgaccaacatggaccctgtggacacagccacgtattactgtgccagagccctcacctactatgatgangagtttgcttactggggccctggaacgctggtcaccgtcagctca

SEQ ID NO: 229 - protein, 119 aa, Artificial Sequence
  FEP-h4, 8, 12, 16 heavy chain variable domain amino acid S119
QVQLQQSGPGLVKPSQTLSLTCAISGFSLFNYGVHWIRQSPSRGLEWLGVIWSGGNTDYNTPFTSRLTISKDTSKNQVVLTMTNMDPVDTATYYCARALTYYDEEFAYWGPGTLVTVSS

SEQ ID NO: 230 - DNA, 357 bp, Artificial Sequence
  FEP-h4, 8, 12, 16 heavy chain variable domain nucleic acid A119
  variation 312: n = a or g
caggtacagctgcagcagtcaggtccaggactggtgaagccctcgcagaccctctcactcacctgtgccatctctggtttctcattatttaactatggtgtacactggatcaggcagtccccatcgagaggccttgagtggctgggtgtgatatggagtggtggaaacacagactataatacacctttcacatccagactcaccatctccaaggacacctccaaaaaccaggtggtccttacaatgaccaacatggaccctgtggacacagccacgtattactgtgccagagccctcacctactatgatgangagtttgcttactggggccctggaacgctggtcaccgtcagcgca

SEQ ID NO: 231 - protein, 119 aa, Artificial Sequence
  FEP-h4, 8, 12, 16 heavy chain variable domain amino acid A119
QVQLQQSGPGLVKPSQTLSLTCAISGFSLFNYGVHWIRQSPSRGLEWLGVIWSGGNTDYNTPFTSRLTISKDTSKNQVVLTMTNMDPVDTATYYCARALTYYDEEFAYWGPGTLVTVSA

SEQ ID NO: 232 - DNA, 1347 bp, Artificial Sequence
  FEP-h5, 9, 13, 17 heavy chain nucleic acid S119
  variation 312: n = a or g
  V_region (1)...(357)
  C_region (358)...(1347)
gaggtccagctggtacagtctggggctgaggtgaagaagcctggggctacagtgaaaatctcctgcaaggtttctggtttttcattatttaactatggtgtacactggatccgccagcccccagggaaggggctggagtggattggtgtgatatggagtggtggaaacacagactataatacacctttcacatccagattcaccatctccagagacaattccaagaacacgctgtatcttcaaatgaacagcctgagagccgaggacacggccgtgtattactgtgccagagccctcacctactatgatgangagtttgcttactggggccctggaacgctggtcaccgtcagctcagcctccaccaagggcccatcggtcttccccctggcaccctcctccaagagcacctctgggggcacagcggccctgggctgcctggtcaaggactacttccccgaaccggtgacggtgtcgtggaactcaggcgccctgaccagcggcgtgcacaccttcccggctgtcctacagtcctcaggactctactccctcagcagcgtggtgaccgtgccctccagcagcttgggcacccagacctacatctgcaacgtgaatcacaagcccagcaacaccaaggtggacaagaaagttgagcccaaatcttgtgacaaaactcacacatgcccaccgtgcccagcacctgaactcctggggggaccgtcagtcttcctcttccccccaaaacccaaggacaccctcatgatctcccggacccctgaggtcacatgcgtggtggtggacgtgagccacgaagaccctgaggtcaagttcaactggtacgtggacggcgtggaggtgcataatgccaagacaaagccgcgggaggagcagtacaacagcacgtaccgtgtggtcagcgtcctcaccgtcctgcaccaggactggctgaatggcaaggagtacaagtgcaaggtcagcaacaaagccctcccagcccccatcgagaaaaccatctccaaagccaaagggcagccccgagaaccacaggtgtacaccctgcccccatcccgggatgagctgaccaagaaccaggtcagcctgacctgcctggtcaaaggcttctatcccagcgacatcgccgtggagtgggagagcaatgggcagccggagaacaactacaagaccacgcctcccgtgctggactccgacggctccttcttcctctacagcaagctcaccgtggacaagagcaggtggcagcaggggaacgtcttctcatgctccgtgatgcatgaggctctgcacaaccactacacgcagaagagcctctccctgtctccgggtaaa

SEQ ID NO: 233 - protein, 449 aa, Artificial Sequence; identical to SEQ ID NO: 209
  FEP-h5, 9, 13, 17 heavy chain amino acid S119
  DOMAIN (1)...(119): variable domain
  DOMAIN (120)...(217): CH1
  DOMAIN (218)...(232): hinge region
  DOMAIN (233)...(342): CH2
  DOMAIN (343)...(449): CH3

SEQ ID NO: 234 - DNA, 357 bp, Artificial Sequence
  FEP-h5, 9, 13, 17 heavy chain variable domain nucleic acid S119
  variation 312: n = a or g
gaggtccagctggtacagtctggggctgaggtgaagaagcctggggctacagtgaaaatctcctgcaaggtttctggtttttcattatttaactatggtgtacactggatccgccagcccccagggaaggggctggagtggattggtgtgatatggagtggtggaaacacagactataatacacctttcacatccagattcaccatctccagagacaattccaagaacacgctgtatcttcaaatgaacagcctgagagccgaggacacggccgtgtattactgtgccagagccctcacctactatgatgangagtttgcttactggggccctggaacgctggtcaccgtcagctca

SEQ ID NO: 235 - protein, 119 aa, Artificial Sequence; identical to SEQ ID NO: 211
  FEP-h5, 9, 13, 17 heavy chain variable domain amino acid S119

SEQ ID NO: 236 - DNA, 357 bp, Artificial Sequence
  FEP-h5, 9, 13, 17 heavy chain variable domain nucleic acid A119
  variation 312: n = a or g
gaggtccagctggtacagtctggggctgaggtgaagaagcctggggctacagtgaaaatctcctgcaaggtttctggtttttcattatttaactatggtgtacactggatccgccagcccccagggaaggggctggagtggattggtgtgatatggagtggtggaaacacagactataatacacctttcacatccagattcaccatctccagagacaattccaagaacacgctgtatcttcaaatgaacagcctgagagccgaggacacggccgtgtattactgtgccagagccctcacctactatgatgangagtttgcttactggggccctggaacgctggtcaccgtcagcgca

SEQ ID NO: 237 - protein, 119 aa, Artificial Sequence; identical to SEQ ID NO: 213
  FEP-h5, 9, 13, 17 heavy chain variable domain amino acid A119

SEQ ID NO: 238 - DNA, 1347 bp, Artificial Sequence
  FEP-h6 heavy chain nucleic acid S119
  variation 312: n = a or g
  V_region (1)...(357)
  C_region (358)...(1347)
gaggtccagctggtacagtctggggctgaggtgaagaagcctggggctacagtgaaaatctcctgcaaggtttctggtttctcattatttaactatggtgtacactggatcaggcagtccccatcgagaggccttgagtggctgggtgtgatatggagtggtggaaacacagactataatacacctttcacatccagattcaccatctccagagacaattccaagaacacgctgtatcttcaaatgaacagcctgagagccgaggacacggccgtgtattactgtgccagagccctcacctactatgatgangagtttgcttactggggccctggaacgctggtcaccgtcagctcagcctccaccaagggcccatcggtcttccccctggcaccctcctccaagagcacctctgggggcacagcggccctgggctgcctggtcaaggactacttccccgaaccggtgacggtgtcgtggaactcaggcgccctgaccagcggcgtgcacaccttcccggctgtcctacagtcctcaggactctactccctcagcagcgtggtgaccgtgccctccagcagcttgggcacccagacctacatctgcaacgtgaatcacaagcccagcaacaccaaggtggacaagaaagttgagcccaaatcttgtgacaaaactcacacatgcccaccgtgcccagcacctgaactcctggggggaccgtcagtcttcctcttccccccaaaacccaaggacaccctcatgatctcccggacccctgaggtcacatgcgtggtggtggacgtgagccacgaagaccctgaggtcaagttcaactggtacgtggacggcgtggaggtgcataatgccaagacaaagccgcgggaggagcagtacaacagcacgtaccgtgtggtcagcgtcctcaccgtcctgcaccaggactggctgaatggcaaggagtacaagtgcaaggtcagcaacaaagccctcccagcccccatcgagaaaaccatctccaaagccaaagggcagccccgagaaccacaggtgtacaccctgcccccatcccgggatgagctgaccaagaaccaggtcagcctgacctgcctggtcaaaggcttctatcccagcgacatcgccgtggagtgggagagcaatgggcagccggagaacaactacaagaccacgcctcccgtgctggactccgacggctccttcttcctctacagcaagctcaccgtggacaagagcaggtggcagcaggggaacgtcttctcatgctccgtgatgcatgaggctctgcacaaccactacacgcagaagagcctctccctgtctccgggtaaa

SEQ ID NO: 239 - protein, 449 aa, Artificial Sequence
  FEP-h6 heavy chain amino acid S119
  DOMAIN (1)...(119): variable domain
  DOMAIN (120)...(217): CH1
  DOMAIN (218)...(232): hinge region
  DOMAIN (233)...(342): CH2
  DOMAIN (343)...(449): CH3
EVQLVQSGAEVKKPGATVKISCKVSGFSLFNYGVHWIRQSPSRGLEWLGVIWSGGNTDYNTPFTSRFTISRDNSKNTLYLQMNSLRAEDTAVYYCARALTYYDEEFAYWGPGTLVTVSSASTKGPSVFPLAPSSKSTSGGTAALGCLVKDYFPEPVTVSWNSGALTSGVHTFPAVLQSSGLYSLSSVVTVPSSSLGTQTYICNVNHKPSNTKVDKKVEPKSCDKTHTCPPCPAPELLGGPSVFLFPPKPKDTLMISRTPEVTCVVVDVSHEDPEVKFNWYVDGVEVHNAKTKPREEQYNSTYRVVSVLTVLHQDWLNGKEYKCKVSNKALPAPIEKTISKAKGQPREPQVYTLPPSRDELTKNQVSLTCLVKGFYPSDIAVEWESNGQPENNYKTTPPVLDSDGSFFLYSKLTVDKSRWQQGNVFSCSVMHEALHNHYTQKSLSLSPGK

SEQ ID NO: 240 - DNA, 357 bp, Artificial Sequence
  FEP-h6 heavy chain variable domain nucleic acid S119
  variation 312: n = a or g
gaggtccagctggtacagtctggggctgaggtgaagaagcctggggctacagtgaaaatctcctgcaaggtttctggtttctcattatttaactatggtgtacactggatcaggcagtccccatcgagaggccttgagtggctgggtgtgatatggagtggtggaaacacagactataatacacctttcacatccagattcaccatctccagagacaattccaagaacacgctgtatcttcaaatgaacagcctgagagccgaggacacggccgtgtattactgtgccagagccctcacctactatgatgangagtttgcttactggggccctggaacgctggtcaccgtcagctca

SEQ ID NO: 241 - protein, 119 aa, Artificial Sequence
  FEP-h6 heavy chain variable domain amino acid S119
EVQLVQSGAEVKKPGATVKISCKVSGFSLFNYGVHWIRQSPSRGLEWLGVIWSGGNTDYNTPFTSRFTISRDNSKNTLYLQMNSLRAEDTAVYYCARALTYYDEEFAYWGPGTLVTVSS

SEQ ID NO: 242 - DNA, 357 bp, Artificial Sequence
  FEP-h6 heavy chain variable domain nucleic acid A119
  variation 312: n = a or g
  V_region (1)...(357)
  C_region (358)...(1347)
gaggtccagctggtacagtctggggctgaggtgaagaagcctggggctacagtgaaaatctcctgcaaggtttctggtttctcattatttaactatggtgtacactggatcaggcagtccccatcgagaggccttgagtggctgggtgtgatatggagtggtggaaacacagactataatacacctttcacatccagattcaccatctccagagacaattccaagaacacgctgtatcttcaaatgaacagcctgagagccgaggacacggccgtgtattactgtgccagagccctcacctactatgatgangagtttgcttactggggccctggaacgctggtcaccgtcagcgca

SEQ ID NO: 243 - protein, 119 aa, Artificial Sequence
  FEP-h6 heavy chain variable domain amino acid A119
EVQLVQSGAEVKKPGATVKISCKVSGFSLFNYGVHWIRQSPSRGLEWLGVIWSGGNTDYNTPFTSRFTISRDNSKNTLYLQMNSLRAEDTAVYYCARALTYYDEEFAYWGPGTLVTVSA

SEQ ID NO: 244 - DNA, 1347 bp, Artificial Sequence
  FEP-h10, 14, 18 heavy chain nucleic acid S119
  variation 312: n = a or g
  V_region (1)...(357)
  C_region (358)...(1347)
gaggtccagctggtacagtctggggctgaggtgaagaagcctggggctacagtgaaaatctcctgcaaggtttctggtttctcattatttaactatggtgtacactggatccgccagcccccagggaaggggctggagtggattggtgtgatatggagtggtggaaacacagactataatacacctttcacatccagattcaccatctccagagatgattcaaagaacacggcgtatctgcaaatgaacagcctgaaaaccgaggacacggccgtgtattactgtgccagagccctcacctactatgatgangagtttgcttactggggccctggaacgctggtcaccgtcagctcagcctccaccaagggcccatcggtcttccccctggcaccctcctccaagagcacctctgggggcacagcggccctgggctgcctggtcaaggactacttccccgaaccggtgacggtgtcgtggaactcaggcgccctgaccagcggcgtgcacaccttcccggctgtcctacagtcctcaggactctactccctcagcagcgtggtgaccgtgccctccagcagcttgggcacccagacctacatctgcaacgtgaatcacaagcccagcaacaccaaggtggacaagaaagttgagcccaaatcttgtgacaaaactcacacatgcccaccgtgcccagcacctgaactcctggggggaccgtcagtcttcctcttccccccaaaacccaaggacaccctcatgatctcccggacccctgaggtcacatgcgtggtggtggacgtgagccacgaagaccctgaggtcaagttcaactggtacgtggacggcgtggaggtgcataatgccaagacaaagccgcgggaggagcagtacaacagcacgtaccgtgtggtcagcgtcctcaccgtcctgcaccaggactggctgaatggcaaggagtacaagtgcaaggtcagcaacaaagccctcccagcccccatcgagaaaaccatctccaaagccaaagggcagccccgagaaccacaggtgtacaccctgcccccatcccgggatgagctgaccaagaaccaggtcagcctgacctgcctggtcaaaggcttctatcccagcgacatcgccgtggagtgggagagcaatgggcagccggagaacaactacaagaccacgcctcccgtgctggactccgacggctccttcttcctctacagcaagctcaccgtggacaagagcaggtggcagcaggggaacgtcttctcatgctccgtgatgcatgaggctctgcacaaccactacacgcagaagagcctctccctgtctccgggtaaa

SEQ ID NO: 245 - protein, 449 aa, Artificial Sequence
  FEP-h10, 14, 18 heavy chain amino acid S119
  DOMAIN (1)...(119): variable domain
  DOMAIN (120)...(217): CH1
  DOMAIN (218)...(232): hinge region
  DOMAIN (233)...(342): CH2
  DOMAIN (343)...(449): CH3
EVQLVQSGAEVKKPGATVKISCKVSGFSLFNYGVHWIRQPPGKGLEWIGVIWSGGNTDYNTPFTSRFTISRDDSKNTAYLQMNSLKTEDTAVYYCARALTYYDEEFAYWGPGTLVTVSSASTKGPSVFPLAPSSKSTSGGTAALGCLVKDYFPEPVTVSWNSGALTSGVHTFPAVLQSSGLYSLSSVVTVPSSSLGTQTYICNVNHKPSNTKVDKKVEPKSCDKTHTCPPCPAPELLGGPSVFLFPPKPKDTLMISRTPEVTCVVVDVSHEDPEVKFNWYVDGVEVHNAKTKPREEQYNSTYRVVSVLTVLHQDWLNGKEYKCKVSNKALPAPIEKTISKAKGQPREPQVYTLPPSRDELTKNQVSLTCLVKGFYPSDIAVEWESNGQPENNYKTTPPVLDSDGSFFLYSKLTVDKSRWQQGNVFSCSVMHEALHNHYTQKSLSLSPGK

SEQ ID NO: 246 - DNA, 357 bp, Artificial Sequence
  FEP-h10, 14, 18 heavy chain variable domain nucleic acid S119
  variation 312: n = a or g
gaggtccagctggtacagtctggggctgaggtgaagaagcctggggctacagtgaaaatctcctgcaaggtttctggtttctcattatttaactatggtgtacactggatccgccagcccccagggaaggggctggagtggattggtgtgatatggagtggtggaaacacagactataatacacctttcacatccagattcaccatctccagagatgattcaaagaacacggcgtatctgcaaatgaacagcctgaaaaccgaggacacggccgtgtattactgtgccagagccctcacctactatgatgangagtttgcttactggggccctggaacgctggtcaccgtcagctca

SEQ ID NO: 247 - protein, 119 aa, Artificial Sequence
  FEP-h10, 14, 18 heavy chain variable domain amino acid S119
EVQLVQSGAEVKKPGATVKISCKVSGFSLFNYGVHWIRQPPGKGLEWIGVIWSGGNTDYNTPFTSRFTISRDDSKNTAYLQMNSLKTEDTAVYYCARALTYYDEEFAYWGPGTLVTVSS

SEQ ID NO: 248 - DNA, 357 bp, Artificial Sequence
  FEP-h10, 14, 18 heavy chain variable domain nucleic acid A119
  variation 312: n = a or g
gaggtccagctggtacagtctggggctgaggtgaagaagcctggggctacagtgaaaatctcctgcaaggtttctggtttctcattatttaactatggtgtacactggatccgccagcccccagggaaggggctggagtggattggtgtgatatggagtggtggaaacacagactataatacacctttcacatccagattcaccatctccagagatgattcaaagaacacggcgtatctgcaaatgaacagcctgaaaaccgaggacacggccgtgtattactgtgccagagccctcacctactatgatgangagtttgcttactggggccctggaacgctggtcaccgtcagcgca

SEQ ID NO: 249 - protein, 119 aa, Artificial Sequence
  FEP-h10, 14, 18 heavy chain variable domain amino acid A119
EVQLVQSGAEVKKPGATVKISCKVSGFSLFNYGVHWIRQPPGKGLEWIGVIWSGGNTDYNTPFTSRFTISRDDSKNTAYLQMNSLKTEDTAVYYCARALTYYDEEFAYWGPGTLVTVSA

SEQ ID NO: 250 - DNA, 642 bp, Artificial Sequence; identical to SEQ ID NO: 201
  FEP-h1, 2 light chain nucleic acid Q100 VEIK
  V_region (1)...(321)
  C_region (322)...(642)

SEQ ID NO: 251 - protein, 214 aa, Artificial Sequence; identical to SEQ ID NO: 202
  FEP-h1, 2 light chain amino acid Q100 VEIK
  DOMAIN (1)...(107): variable domain
  DOMAIN (108)...(214): constant domain

SEQ ID NO: 252 - DNA, 321 bp, Artificial Sequence; identical to SEQ ID NO: 203
  FEP-h1, 2 light chain variable domain nucleic acid Q100 VEIK

SEQ ID NO: 253 - protein, 107 aa, Artificial Sequence; identical to SEQ ID NO: 204
  FEP-h1, 2 light chain variable domain amino acid Q100 VEIK

SEQ ID NO: 254 - protein, 107 aa, Artificial Sequence; identical to SEQ ID NO: 205
  FEP-h1, 2 light chain variable domain amino acid A100 LELK

SEQ ID NO: 255 - DNA, 321 bp, Artificial Sequence; identical to SEQ ID NO: 206
  FEP-h1, 2 light chain variable domain nucleic acid Q100 LELK

SEQ ID NO: 256 - protein, 107 aa, Artificial Sequence; identical to SEQ ID NO: 207
  FEP-h1, 2 light chain variable domain amino acid Q100 LELK

SEQ ID NO: 257 - DNA, 642 bp, Artificial Sequence; identical to SEQ ID NO: 180
  FEP-h3, 4 light chain nucleic acid Q100 VEIK
  V_region (1)...(321)
  C_region (322)...(642)

SEQ ID NO: 258 - protein, 214 aa, Artificial Sequence; identical to SEQ ID NO: 181
  FEP-h3, 4 light chain amino acid Q100 VEIK
  DOMAIN (1)...(107): variable domain
  DOMAIN (108)...(214): constant domain

SEQ ID NO: 259 - DNA, 321 bp, Artificial Sequence; identical to SEQ ID NO: 182
  FEP-h3, 4 light chain variable domain nucleic acid Q100 VEIK

SEQ ID NO: 260 - protein, 107 aa, Artificial Sequence; identical to SEQ ID NO: 183
  FEP-h3, 4 light chain variable domain amino acid Q100 VEIK

SEQ ID NO: 261 - protein, 107 aa, Artificial Sequence; identical to SEQ ID NO: 184
  FEP-h3, 4 light chain variable domain amino acid A100 LELK

SEQ ID NO: 262 - DNA, 321 bp, Artificial Sequence; identical to SEQ ID NO: 185
  FEP-h3, 4 light chain variable domain nucleic acid Q100 LELK

SEQ ID NO: 263 - protein, 107 aa, Artificial Sequence; identical to SEQ ID NO: 186
  FEP-h3, 4 light chain variable domain amino acid Q100 LELK

SEQ ID NO: 264 - DNA, 642 bp, Artificial Sequence; identical to SEQ ID NO: 194
  FEP-h5 light chain nucleic acid Q100 VEIK
  V_region (1)...(321)
  C_region (322)...(642)

SEQ ID NO: 265 - protein, 214 aa, Artificial Sequence; identical to SEQ ID NO: 195
  FEP-h5 light chain amino acid Q100 VEIK
  DOMAIN (1)...(107): variable domain
  DOMAIN (108)...(214): constant domain

SEQ ID NO: 266 - DNA, 321 bp, Artificial Sequence; identical to SEQ ID NO: 196
  FEP-h5 light chain variable domain nucleic acid Q100 VEIK

SEQ ID NO: 267 - protein, 107 aa, Artificial Sequence; identical to SEQ ID NO: 197
  FEP-h5 light chain variable domain amino acid Q100 VEIK

SEQ ID NO: 268 - protein, 107 aa, Artificial Sequence; identical to SEQ ID NO: 198
  FEP-h5 light chain variable domain amino acid A100 LELK

SEQ ID NO: 269 - DNA, 321 bp, Artificial Sequence; identical to SEQ ID NO: 199
  FEP-h5 light chain variable domain nucleic acid Q100 LELK

SEQ ID NO: 270 - protein, 107 aa, Artificial Sequence; identical to SEQ ID NO: 200
  FEP-h5 light chain variable domain amino acid Q100 LELK

SEQ ID NO: 271 - DNA, 642 bp, Artificial Sequence
  FEP-h6, 7, 8 light chain nucleic acid Q100 VEIK
  V_region (1)...(321)
  C_region (322)...(642)
gaaattgtgttgacacagtctccagccaccctgtctttgtctccaggggaaagagccaccctctcctgcagggccagtcagagtattggcacaaacatacactggtaccagcagaaacctggccaggctcccaggctcctcatctattatgcttctgagtctatctctggggtcccatcaaggttcagcggcagtggatctgggacagatttcactctcaccatcagcagcctgcagcctgaagattttgcaacttattactgtcaacaaaataataactggccaaccacgttcggccaagggaccaaggtggaaatcaaacgtacggtggctgcaccatctgtcttcatcttcccgccatctgatgagcagttgaaatctggaactgcctctgttgtgtgcctgctgaataacttctatcccagagaggccaaagtacagtggaaggtggataacgccctccaatcgggtaactcccaggagagtgtcacagagcaggacagcaaggacagcacctacagcctcagcagcaccctgacgctgagcaaagcagactacgagaaacacaaagtctacgcctgcgaagtcacccatcagggcctgagctcgcccgtcacaaagagcttcaacaggggagagtgt

SEQ ID NO: 272 - protein, 214 aa, Artificial Sequence
  FEP-h6, 7, 8 light chain amino acid Q100 VEIK
  DOMAIN (1)...(107): variable domain
  DOMAIN (108)...(214): constant domain
EIVLTQSPATLSLSPGERATLSCRASQSIGTNIHWYQQKPGQAPRLLIYYASESISGVPSRFSGSGSGTDFTLTISSLQPEDFATYYCQQNNNWPTTFGQGTKVEIKRTVAAPSVFIFPPSDEQLKSGTASVVCLLNNFYPREAKVQWKVDNALQSGNSQESVTEQDSKDSTYSLSSTLTLSKADYEKHKVYACEVTHQGLSSPVTKSFNRGEC

SEQ ID NO: 273 - DNA, 321 bp, Artificial Sequence
  FEP-h6, 7, 8 light chain variable domain nucleic acid Q100 VEIK
gaaattgtgttgacacagtctccagccaccctgtctttgtctccaggggaaagagccaccctctcctgcagggccagtcagagtattggcacaaacatacactggtaccagcagaaacctggccaggctcccaggctcctcatctattatgcttctgagtctatctctggggtcccatcaaggttcagcggcagtggatctgggacagatttcactctcaccatcagcagcctgcagcctgaagattttgcaacttattactgtcaacaaaataataactggccaaccacgttcggccaagggaccaaggtggaaatcaaa

SEQ ID NO: 274 - protein, 107 aa, Artificial Sequence
  FEP-h6, 7, 8 light chain variable domain amino acid Q100 VEIK
EIVLTQSPATLSLSPGERATLSCRASQSIGTNIHWYQQKPGQAPRLLIYYASESISGVPSRFSGSGSGTDFTLTISSLQPEDFATYYCQQNNNWPTTFGQGTKVEIK

SEQ ID NO: 275 - protein, 107 aa, Artificial Sequence
  FEP-h6, 7, 8 light chain variable domain amino acid A100 LELK
EIVLTQSPATLSLSPGERATLSCRASQSIGTNIHWYQQKPGQAPRLLIYYASESISGVPSRFSGSGSGTDFTLTISSLQPEDFATYYCQQNNNWPTTFGAGTKLELK

SEQ ID NO: 276 - DNA, 321 bp, Artificial Sequence
  FEP-h6, 7, 8 light chain variable domain nucleic acid Q100 LELK
gaaattgtgttgacacagtctccagccaccctgtctttgtctccaggggaaagagccaccctctcctgcagggccagtcagagtattggcacaaacatacactggtaccagcagaaacctggccaggctcccaggctcctcatctattatgcttctgagtctatctctggggtcccatcaaggttcagcggcagtggatctgggacagatttcactctcaccatcagcagcctgcagcctgaagattttgcaacttattactgtcaacaaaataataactggccaaccacgttcggccaagggaccaagctggagctgaaa

SEQ ID NO: 277 - protein, 107 aa, Artificial Sequence
  FEP-h6, 7, 8 light chain variable domain amino acid Q100 LELK
EIVLTQSPATLSLSPGERATLSCRASQSIGTNIHWYQQKPGQAPRLLIYYASESISGVPSRFSGSGSGTDFTLTISSLQPEDFATYYCQQNNNWPTTFGQGTKLELK

SEQ ID NO: 278 - DNA, 642 bp, Artificial Sequence
  FEP-h9, 10, 11, 12, 20  light chain nucleic acid Q100 VEIK
  V_region (1)...(321)
  C_region (322)...(642)
gccatccagttgacccagtctccatcctccctgtctgcatctgtaggagacagagtcaccatcacttgcagggccagtcagagtattggcacaaacatacactggtaccagcagaaacctggccaggctcccaggctcctcatctattatgcttctgagtctatctctgggatcccacctcgattcagtggcagcgggtctgggacagacttcactctcaccatcagcagactggagcctgaagattttgcagtgtattactgtcaacaaaataataactggccaaccacgttcggccaagggaccaaggtggaaatcaaacgtacggtggctgcaccatctgtcttcatcttcccgccatctgatgagcagttgaaatctggaactgcctctgttgtgtgcctgctgaataacttctatcccagagaggccaaagtacagtggaaggtggataacgccctccaatcgggtaactcccaggagagtgtcacagagcaggacagcaaggacagcacctacagcctcagcagcaccctgacgctgagcaaagcagactacgagaaacacaaagtctacgcctgcgaagtcacccatcagggcctgagctcgcccgtcacaaagagcttcaacaggggagagtgt

SEQ ID NO: 279 - protein, 214 aa, Artificial Sequence
  FEP-h9, 10, 11, 12, 20  light chain amino acid Q100 VEIK
  DOMAIN (1)...(107): variable domain
  DOMAIN (108)...(214): constant domain
AIQLTQSPSSLSASVGDRVTITCRASQSIGTNIHWYQQKPGQAPRLLIYYASESISGIPPRFSGSGSGTDFTLTISRLEPEDFAVYYCQQNNNWPTTFGQGTKVEIKRTVAAPSVFIFPPSDEQLKSGTASVVCLLNNFYPREAKVQWKVDNALQSGNSQESVTEQDSKDSTYSLSSTLTLSKADYEKHKVYACEVTHQGLSSPVTKSFNRGEC

SEQ ID NO: 280 - DNA, 321 bp, Artificial Sequence
  FEP-h9, 10, 11, 12, 20  light chain variable domain nucleic acid Q100 VEIK
gccatccagttgacccagtctccatcctccctgtctgcatctgtaggagacagagtcaccatcacttgcagggccagtcagagtattggcacaaacatacactggtaccagcagaaacctggccaggctcccaggctcctcatctattatgcttctgagtctatctctgggatcccacctcgattcagtggcagcgggtctgggacagacttcactctcaccatcagcagactggagcctgaagattttgcagtgtattactgtcaacaaaataataactggccaaccacgttcggccaagggaccaaggtggaaatcaaa

SEQ ID NO: 281 - protein, 107 aa, Artificial Sequence
  FEP-h9, 10, 11, 12, 20  light chain variable domain amino acid Q100 VEIK
AIQLTQSPSSLSASVGDRVTITCRASQSIGTNIHWYQQKPGQAPRLLIYYASESISGIPPRFSGSGSGTDFTLTISRLEPEDFAVYYCQQNNNWPTTFGQGTKVEIK

SEQ ID NO: 282 - protein, 107 aa, Artificial Sequence
  FEP-h9, 10, 11, 12, 20  light chain variable domain amino acid A100 LELK
AIQLTQSPSSLSASVGDRVTITCRASQSIGTNIHWYQQKPGQAPRLLIYYASESISGIPPRFSGSGSGTDFTLTISRLEPEDFAVYYCQQNNNWPTTFGAGTKLELK

SEQ ID NO: 283 - DNA, 321 bp, Artificial Sequence
  FEP-h9, 10, 11, 12, 20  light chain variable domain nucleic acid Q100 LELK
gccatccagttgacccagtctccatcctccctgtctgcatctgtaggagacagagtcaccatcacttgcagggccagtcagagtattggcacaaacatacactggtaccagcagaaacctggccaggctcccaggctcctcatctattatgcttctgagtctatctctgggatcccacctcgattcagtggcagcgggtctgggacagacttcactctcaccatcagcagactggagcctgaagattttgcagtgtattactgtcaacaaaataataactggccaaccacgttcggccaagggaccaagctggagctgaaa

SEQ ID NO: 284 - protein, 107 aa, Artificial Sequence
  FEP-h9, 10, 11, 12, 20  light chain variable domain amino acid Q100 LELK
AIQLTQSPSSLSASVGDRVTITCRASQSIGTNIHWYQQKPGQAPRLLIYYASESISGIPPRFSGSGSGTDFTLTISRLEPEDFAVYYCQQNNNWPTTFGQGTKLELK

SEQ ID NO: 285 - DNA, 642 bp, Artificial Sequence
  FEP-h13, 14, 15, 16, 21 light chain nucleic acid Q100 VEIK
  V_region (1)...(321)
  C_region (322)...(642)
gccatccagttgacccagtctccatcctccctgtctgcatctgtaggagacagagtcaccatcacttgcagggccagtcagagtattggcacaaacatacactggtaccagcagaaacctggccaggctcccaggctcctcatctattatgcttctgagtctatctctgggatcccagacaggttcagtggcagtgggtctgggacagacttcactctcaccatcagcagactggagcctgaagattttgcagtgtattactgtcaacaaaataataactggccaaccacgttcggccaagggaccaaggtggaaatcaaacgtacggtggctgcaccatctgtcttcatcttcccgccatctgatgagcagttgaaatctggaactgcctctgttgtgtgcctgctgaataacttctatcccagagaggccaaagtacagtggaaggtggataacgccctccaatcgggtaactcccaggagagtgtcacagagcaggacagcaaggacagcacctacagcctcagcagcaccctgacgctgagcaaagcagactacgagaaacacaaagtctacgcctgcgaagtcacccatcagggcctgagctcgcccgtcacaaagagcttcaacaggggagagtgt

SEQ ID NO: 286 - protein, 214 aa, Artificial Sequence
  FEP-h13, 14, 15, 16, 21 light chain amino acid Q100 VEIK
  DOMAIN (1)...(107): variable domain
  DOMAIN (108)...(214): constant domain
AIQLTQSPSSLSASVGDRVTITCRASQSIGTNIHWYQQKPGQAPRLLIYYASESISGIPDRFSGSGSGTDFTLTISRLEPEDFAVYYCQQNNNWPTTFGQGTKVEIKRTVAAPSVFIFPPSDEQLKSGTASVVCLLNNFYPREAKVQWKVDNALQSGNSQESVTEQDSKDSTYSLSSTLTLSKADYEKHKVYACEVTHQGLSSPVTKSFNRGEC

SEQ ID NO: 287 - DNA, 321 bp, Artificial Sequence
  FEP-h13, 14, 15, 16, 21 light chain variable domain nucleic acid Q100 VEIK
gccatccagttgacccagtctccatcctccctgtctgcatctgtaggagacagagtcaccatcacttgcagggccagtcagagtattggcacaaacatacactggtaccagcagaaacctggccaggctcccaggctcctcatctattatgcttctgagtctatctctgggatcccagacaggttcagtggcagtgggtctgggacagacttcactctcaccatcagcagactggagcctgaagattttgcagtgtattactgtcaacaaaataataactggccaaccacgttcggccaagggaccaaggtggaaatcaaa

SEQ ID NO: 288 - protein, 107 aa, Artificial Sequence
  FEP-h13, 14, 15, 16, 21 light chain variable domain amino acid Q100 VEIK
AIQLTQSPSSLSASVGDRVTITCRASQSIGTNIHWYQQKPGQAPRLLIYYASESISGIPDRFSGSGSGTDFTLTISRLEPEDFAVYYCQQNNNWPTTFGQGTKVEIK

SEQ ID NO: 289 - protein, 107 aa, Artificial Sequence
  FEP-h13, 14, 15, 16, 21 light chain variable domain amino acid A100 LELK
AIQLTQSPSSLSASVGDRVTITCRASQSIGTNIHWYQQKPGQAPRLLIYYASESISGIPDRFSGSGSGTDFTLTISRLEPEDFAVYYCQQNNNWPTTFGAGTKLELK

SEQ ID NO: 290 - DNA, 321 bp, Artificial Sequence
  FEP-h13, 14, 15, 16, 21 light chain variable domain nucleic acid Q100 LELK
gccatccagttgacccagtctccatcctccctgtctgcatctgtaggagacagagtcaccatcacttgcagggccagtcagagtattggcacaaacatacactggtaccagcagaaacctggccaggctcccaggctcctcatctattatgcttctgagtctatctctgggatcccagacaggttcagtggcagtgggtctgggacagacttcactctcaccatcagcagactggagcctgaagattttgcagtgtattactgtcaacaaaataataactggccaaccacgttcggccaagggaccaagctggagctgaaa

SEQ ID NO: 291 - protein, 107 aa, Artificial Sequence
  FEP-h13, 14, 15, 16, 21 light chain variable domain amino acid Q100 LELK
AIQLTQSPSSLSASVGDRVTITCRASQSIGTNIHWYQQKPGQAPRLLIYYASESISGIPDRFSGSGSGTDFTLTISRLEPEDFAVYYCQQNNNWPTTFGQGTKLELK

SEQ ID NO: 292 - DNA, 642 bp, Artificial Sequence
  FEP-h17 light chain nucleic acid Q100 VEIK
  V_region (1)...(321)
  C_region (322)...(642)
gaaattgtgttgacacagtctccagccaccctgtctttgtctccaggggaaagagccaccctctcctgcagggccagtcagagtattggcacaaacatacactggtaccagcagaaacctggccaggctcccaggctcctcatctattatgcttctgagtctatctctgggatcccagccaggttcagtggcagtgggtctgggacagagttcactctcaccatcagcagcctgcagtctgaagattttgcagtttattactgtcaacaaaataataactggccaaccacgttcggccaagggaccaaggtggaaatcaaacgtacggtggctgcaccatctgtcttcatcttcccgccatctgatgagcagttgaaatctggaactgcctctgttgtgtgcctgctgaataacttctatcccagagaggccaaagtacagtggaaggtggataacgccctccaatcgggtaactcccaggagagtgtcacagagcaggacagcaaggacagcacctacagcctcagcagcaccctgacgctgagcaaagcagactacgagaaacacaaagtctacgcctgcgaagtcacccatcagggcctgagctcgcccgtcacaaagagcttcaacaggggagagtgt

SEQ ID NO: 293 - protein, 214 aa, Artificial Sequence
  FEP-h17 light chain amino acid Q100 VEIK
  DOMAIN (1)...(107): variable domain
  DOMAIN (108)...(214): constant domain
EIVLTQSPATLSLSPGERATLSCRASQSIGTNIHWYQQKPGQAPRLLIYYASESISGIPARFSGSGSGTEFTLTISSLQSEDFAVYYCQQNNNWPTTFGQGTKVEIKRTVAAPSVFIFPPSDEQLKSGTASVVCLLNNFYPREAKVQWKVDNALQSGNSQESVTEQDSKDSTYSLSSTLTLSKADYEKHKVYACEVTHQGLSSPVTKSFNRGEC

SEQ ID NO: 294 - DNA, 321 bp, Artificial Sequence
  FEP-h17 light chain variable domain nucleic acid Q100 VEIK
gaaattgtgttgacacagtctccagccaccctgtctttgtctccaggggaaagagccaccctctcctgcagggccagtcagagtattggcacaaacatacactggtaccagcagaaacctggccaggctcccaggctcctcatctattatgcttctgagtctatctctgggatcccagccaggttcagtggcagtgggtctgggacagagttcactctcaccatcagcagcctgcagtctgaagattttgcagtttattactgtcaacaaaataataactggccaaccacgttcggccaagggaccaaggtggaaatcaaa

SEQ ID NO: 295 - protein, 107 aa, Artificial Sequence
  FEP-h17 light chain variable domain amino acid Q100 VEIK
EIVLTQSPATLSLSPGERATLSCRASQSIGTNIHWYQQKPGQAPRLLIYYASESISGIPARFSGSGSGTEFTLTISSLQSEDFAVYYCQQNNNWPTTFGQGTKVEIK

SEQ ID NO: 296 - protein, 107 aa, Artificial Sequence
  FEP-h17 light chain variable domain amino acid A100 LELK
EIVLTQSPATLSLSPGERATLSCRASQSIGTNIHWYQQKPGQAPRLLIYYASESISGIPARFSGSGSGTEFTLTISSLQSEDFAVYYCQQNNNWPTTFGAGTKLELK

SEQ ID NO: 297 - DNA, 321 bp, Artificial Sequence
  FEP-h17 light chain variable domain nucleic acid Q100 LELK
gaaattgtgttgacacagtctccagccaccctgtctttgtctccaggggaaagagccaccctctcctgcagggccagtcagagtattggcacaaacatacactggtaccagcagaaacctggccaggctcccaggctcctcatctattatgcttctgagtctatctctgggatcccagccaggttcagtggcagtgggtctgggacagagttcactctcaccatcagcagcctgcagtctgaagattttgcagtttattactgtcaacaaaataataactggccaaccacgttcggccaagggaccaagctggagctgaaa

SEQ ID NO: 298 - protein, 107 aa, Artificial Sequence
  FEP-h17 light chain variable domain amino acid Q100 LELK
EIVLTQSPATLSLSPGERATLSCRASQSIGTNIHWYQQKPGQAPRLLIYYASESISGIPARFSGSGSGTEFTLTISSLQSEDFAVYYCQQNNNWPTTFGQGTKLELK

SEQ ID NO: 299 - DNA, 642 bp, Artificial Sequence; identical to SEQ ID NO: 180
  FEP-h18, 19 light chain nucleic acid Q100 VEIK
  V_region (1)...(321)
  C_region (322)...(642)

SEQ ID NO: 300 - protein, 214 aa, Artificial Sequence; identical to SEQ ID NO: 181
  FEP-h18, 19 light chain amino acid Q100 VEIK
  DOMAIN (1)...(107): variable domain
  DOMAIN (108)...(214): constant domain

SEQ ID NO: 301 - DNA, 321 bp, Artificial Sequence; identical to SEQ ID NO: 182
  FEP-h18, 19 light chain variable domain nucleic acid Q100 VEIK

SEQ ID NO: 302 - protein, 107 aa, Artificial Sequence; identical to SEQ ID NO: 183
  FEP-h18, 19 light chain variable domain amino acid Q100 VEIK

SEQ ID NO: 303 - protein, 107 aa, Artificial Sequence; identical to SEQ ID NO: 184
  FEP-h18, 19 light chain variable domain amino acid A100 LELK

SEQ ID NO: 304 - DNA, 321 bp, Artificial Sequence; identical to SEQ ID NO: 185
  FEP-h18, 19 light chain variable domain nucleic acid Q100 LELK

SEQ ID NO: 305 - protein, 107 aa, Artificial Sequence; identical to SEQ ID NO: 186
  FEP-h18, 19 light chain variable domain amino acid Q100 LELK

SEQ ID NO: 306 - DNA, 8345 bp, Artificial Sequence
  pcDNA3-Erbitux-LC-IRES-HC-WT
  sig_peptide (1126)...(1191): light chain signal sequence
  V_region (1192)...(1512): light chain variable domain
  C_region (1513)...(1833): light chain constant domain
  RBS (1876)...(2450): IRES
  sig_peptide (2464)...(2520): heavy chain signal sequence
  V_region (2521)...(2877): heavy chain variable domain
  C_region (2878)...(3867): heavy chain constan domain
  misc_feature (3868)...(3891): Flag tag
gacggatcgggagatcttcaatattggccattagccatattattcattggttatatagcataaatcaatattggctattggccattgcatacgttgtatctatatcataatatgtacatttatattggctcatgtccaatatgaccgccatgttggcattgattattgactagttattaatagtaatcaattacggggtcattagttcatagcccatatatggagttccgcgttacataacttacggtaaatggcccgcctggctgaccgcccaacgacccccgcccattgacgtcaataatgacgtatgttcccatagtaacgccaatagggactttccattgacgtcaatgggtggagtatttacggtaaactgcccacttggcagtacatcaagtgtatcatatgccaagtccgccccctattgacgtcaatgacggtaaatggcccgcctggcattatgcccagtacatgaccttacgggactttcctacttggcagtacatctacgtattagtcatcgctattaccatggtgatgcggttttggcagtacaccaattggcgtggatagcggtttgactcacggggatttccaagtctccaccccattgacgtcaatgggagtttgttttggcaccaaaatcaacgggactttccaaaatgtcgtaacaactgcgatcgcccgccccgttgacgcaaatgggcggtaggcgtgtacggtgggaggtctatataagcagagctcgtttagtgaaccgtcagatcactagaagctttattgcggtagtttatcacagttaaattgctaacgcagtcagtgcttctgacacaacagtctcgaacttaagctgcagtgactctcttaaggtagccttgcagaagttggtcgtgaggcactgggcaggtaagtatcaaggttacaagacaggtttaaggtgaccaatagaaactgggcttgtcgagacagagaagactcttgcgtttctgataggcacctattggtcttactgacatccactttgcctttctctccacaggtgtccactcccagttcaattacagctcttaaggctagagtacttaatacgactcactataggctagtctcgtcgacgagactagcatggacatgagggtccccgctcagctcctggggctcctgctgctctggctcccaggtgccaagtgtgacatcttgctgactcagtctccagtcatcctgtctgtgagtccaggagaaagagtcagtttctcctgcagggccagtcagagtattggcacaaacatacactggtatcagcaaagaacaaatggttctccaaggcttctcataaagtatgcttctgagtctatctctgggatcccttccaggtttagtggcagtggatcagggacagattttactcttagcatcaacagtgtggagtctgaagatattgcagattattactgtcaacaaaataataactggccaaccacgttcggccaagggaccaaggtggaaatcaaacgtacggtggctgcaccatctgtcttcatcttcccgccatctgatgagcagttgaaatctggaactgcctctgttgtgtgcctgctgaataacttctatcccagagaggccaaagtacagtggaaggtggataacgccctccaatcgggtaactcccaggagagtgtcacagagcaggacagcaaggacagcacctacagcctcagcagcaccctgacgctgagcaaagcagactacgagaaacacaaagtctacgcctgcgaagtcacccatcagggcctgagctcgcccgtcacaaagagcttcaacaggggagagtgttgactcgaggcgcgccgagcatgcatctagggcggccaattccgcccctctccccccccccccctaacgttactggccgaagccgcttggaataaggccggtgtgcgtttgtctatatgttattttccaccatattgccgtcttttggcaatgtgagggcccggaaacctggccctgtcttcttgacgagcattcctaggggtctttcccctctcgccaaaggaatgcaaggtctgttgaatgtcgtgaaggaagcagttcctctggaagcttcttgaagacaaacaacgtctgtagcgaccctttgcaggcagcggaaccccccacctggcgacaggtgcctctgcggccaaaagccacgtgtataagatacacctgcaaaggcggcacaaccccagtgccacgttgtgagttggatagttgtggaaagagtcaaatggctctcctcaagcgtattcaacaaggggctgaaggatgcccagaaggtaccccattgtatgggatctgatctggggcctcggtgcacatgctttacatgtgtttagtcgaggttaaaaaaacgtctaggccccccgaaccacggggacgtggttttcctttgaaaaacacgatgataatatggccacaaccatggagtttgggctgagctggctttttcttgtggctattttaaaaggtgtccagtgtcaggtgcagctgaagcagtcaggacctggcctagtgcagccctcacagagcctgtccatcacctgcacagtctctggtttctcattaactaactatggtgtacactgggttcgccagtctccaggaaagggtctggagtggctgggagtgatatggagtggtggaaacacagactataatacacctttcacatccagactgagcatcaacaaggacaattccaagagccaagttttctttaaaatgaacagtctgcaatctaatgacacagccatatattactgtgccagagccctcacctactatgattacgagtttgcttactggggccagggaacgctggtcaccgtcagctcagcctccaccaagggcccatcggtcttccccctggcaccctcctccaagagcacctctgggggcacagcggccctgggctgcctggtcaaggactacttccccgaaccggtgacggtgtcgtggaactcaggcgccctgaccagcggcgtgcacaccttcccggctgtcctacagtcctcaggactctactccctcagcagcgtggtgaccgtgccctccagcagcttgggcacccagacctacatctgcaacgtgaatcacaagcccagcaacaccaaggtggacaagaaagttgagcccaaatcttgtgacaaaactcacacatgcccaccgtgcccagcacctgaactcctggggggaccgtcagtcttcctcttccccccaaaacccaaggacaccctcatgatctcccggacccctgaggtcacatgcgtggtggtggacgtgagccacgaagaccctgaggtcaagttcaactggtacgtggacggcgtggaggtgcataatgccaagacaaagccgcgggaggagcagtacaacagcacgtaccgtgtggtcagcgtcctcaccgtcctgcaccaggactggctgaatggcaaggagtacaagtgcaaggtcagcaacaaagccctcccagcccccatcgagaaaaccatctccaaagccaaagggcagccccgagaaccacaggtgtacaccctgcccccatcccgggatgagctgaccaagaaccaggtcagcctgacctgcctggtcaaaggcttctatcccagcgacatcgccgtggagtgggagagcaatgggcagccggagaacaactacaagaccacgcctcccgtgctggactccgacggctccttcttcctctacagcaagctcaccgtggacaagagcaggtggcagcaggggaacgtcttctcatgctccgtgatgcatgaggctctgcacaaccactacacgcagaagagcctctccctgtctccgggtaaagattacaaggatgacgacgataagtgagcggccgctcgagtctagagggcccgtttaaacccgctgatcagcctcgactgtgccttctagttgccagccatctgttgtttgcccctcccccgtgccttccttgaccctggaaggtgccactcccactgtcctttcctaataaaatgaggaaattgcatcgcattgtctgagtaggtgtcattctattctggggggtggggtggggcaggacagcaagggggaggattgggaagacaatagcaggcatgctggggatgcggtgggctctatggcttctgaggcggaaagaaccagctggggctctagggggtatccccacgcgccctgtagcggcgcattaagcgcggcgggtgtggtggttacgcgcagcgtgaccgctacacttgccagcgccctagcgcccgctcctttcgctttcttcccttcctttctcgccacgttcgccggctttccccgtcaagctctaaatcgggggctccctttagggttccgatttagtgctttacggcacctcgaccccaaaaaacttgattagggtgatggttcacgtagtgggccatcgccctgatagacggtttttcgccctttgacgttggagtccacgttctttaatagtggactcttgttccaaactggaacaacactcaaccctatctcggtctattcttttgatttataagggattttgccgatttcggcctattggttaaaaaatgagctgatttaacaaaaatttaacgcgaattaattctgtggaatgtgtgtcagttagggtgtggaaagtccccaggctccccagcaggcagaagtatgcaaagcatgcatctcaattagtcagcaaccaggtgtggaaagtccccaggctccccagcaggcagaagtatgcaaagcatgcatctcaattagtcagcaaccatagtcccgcccctaactccgcccatcccgcccctaactccgcccagttccgcccattctccgccccatggctgactaattttttttatttatgcagaggccgaggccgcctctgcctctgagctattccagaagtagtgaggaggcttttttggaggcctaggcttttgcaaaaagctcccgggagcttgtatatccattttcggatctgatcaagagacaggatgaggatcgtttcgcatgattgaacaagatggattgcacgcaggttctccggccgcttgggtggagaggctattcggctatgactgggcacaacagacaatcggctgctctgatgccgccgtgttccggctgtcagcgcaggggcgcccggttctttttgtcaagaccgacctgtccggtgccctgaatgaactgcaggacgaggcagcgcggctatcgtggctggccacgacgggcgttccttgcgcagctgtgctcgacgttgtcactgaagcgggaagggactggctgctattgggcgaagtgccggggcaggatctcctgtcatctcaccttgctcctgccgagaaagtatccatcatggctgatgcaatgcggcggctgcatacgcttgatccggctacctgcccattcgaccaccaagcgaaacatcgcatcgagcgagcacgtactcggatggaagccggtcttgtcgatcaggatgatctggacgaagagcatcaggggctcgcgccagccgaactgttcgccaggctcaaggcgcgcatgcccgacggcgaggatctcgtcgtgacccatggcgatgcctgcttgccgaatatcatggtggaaaatggccgcttttctggattcatcgactgtggccggctgggtgtggcggaccgctatcaggacatagcgttggctacccgtgatattgctgaagagcttggcggcgaatgggctgaccgcttcctcgtgctttacggtatcgccgctcccgattcgcagcgcatcgccttctatcgccttcttgacgagttcttctgagcgggactctggggttcgaaatgaccgaccaagcgacgcccaacctgccatcacgagatttcgattccaccgccgccttctatgaaaggttgggcttcggaatcgttttccgggacgccggctggatgatcctccagcgcggggatctcatgctggagttcttcgcccaccccaacttgtttattgcagcttataatggttacaaataaagcaatagcatcacaaatttcacaaataaagcatttttttcactgcattctagttgtggtttgtccaaactcatcaatgtatcttatcatgtctgtataccgtcgacctctagctagagcttggcgtaatcatggtcatagctgtttcctgtgtgaaattgttatccgctcacaattccacacaacatacgagccggaagcataaagtgtaaagcctggggtgcctaatgagtgagctaactcacattaattgcgttgcgctcactgcccgctttccagtcgggaaacctgtcgtgccagctgcattaatgaatcggccaacgcgcggggagaggcggtttgcgtattgggcgctcttccgcttcctcgctcactgactcgctgcgctcggtcgttcggctgcggcgagcggtatcagctcactcaaaggcggtaatacggttatccacagaatcaggggataacgcaggaaagaacatgtgagcaaaaggccagcaaaaggccaggaaccgtaaaaaggccgcgttgctggcgtttttccataggctccgcccccctgacgagcatcacaaaaatcgacgctcaagtcagaggtggcgaaacccgacaggactataaagataccaggcgtttccccctggaagctccctcgtgcgctctcctgttccgaccctgccgcttaccggatacctgtccgcctttctcccttcgggaagcgtggcgctttctcatagctcacgctgtaggtatctcagttcggtgtaggtcgttcgctccaagctgggctgtgtgcacgaaccccccgttcagcccgaccgctgcgccttatccggtaactatcgtcttgagtccaacccggtaagacacgacttatcgccactggcagcagccactggtaacaggattagcagagcgaggtatgtaggcggtgctacagagttcttgaagtggtggcctaactacggctacactagaagaacagtatttggtatctgcgctctgctgaagccagttaccttcggaaaaagagttggtagctcttgatccggcaaacaaaccaccgctggtagcggtttttttgtttgcaagcagcagattacgcgcagaaaaaaaggatctcaagaagatcctttgatcttttctacggggtctgacgctcagtggaacgaaaactcacgttaagggattttggtcatgagattatcaaaaaggatcttcacctagatccttttaaattaaaaatgaagttttaaatcaatctaaagtatatatgagtaaacttggtctgacagttaccaatgcttaatcagtgaggcacctatctcagcgatctgtctatttcgttcatccatagttgcctgactccccgtcgtgtagataactacgatacgggagggcttaccatctggccccagtgctgcaatgataccgcgagacccacgctcaccggctccagatttatcagcaataaaccagccagccggaagggccgagcgcagaagtggtcctgcaactttatccgcctccatccagtctattaattgttgccgggaagctagagtaagtagttcgccagttaatagtttgcgcaacgttgttgccattgctacaggcatcgtggtgtcacgctcgtcgtttggtatggcttcattcagctccggttcccaacgatcaaggcgagttacatgatcccccatgttgtgcaaaaaagcggttagctccttcggtcctccgatcgttgtcagaagtaagttggccgcagtgttatcactcatggttatggcagcactgcataattctcttactgtcatgccatccgtaagatgcttttctgtgactggtgagtactcaaccaagtcattctgagaatagtgtatgcggcgaccgagttgctcttgcccggcgtcaatacgggataataccgcgccacatagcagaactttaaaagtgctcatcattggaaaacgttcttcggggcgaaaactctcaaggatcttaccgctgttgagatccagttcgatgtaacccactcgtgcacccaactgatcttcagcatcttttactttcaccagcgtttctgggtgagcaaaaacaggaaggcaaaatgccgcaaaaaagggaataagggcgacacggaaatgttgaatactcatactcttcctttttcaatattattgaagcatttatcagggttattgtctcatgagcggatacatatttgaatgtatttagaaaaataaacaaataggggttccgcgcacatttccccgaaaagtgccacctgacgtc

SEQ ID NO: 307 - DNA, 8345 bp, Artificial Sequence
  pcDNA3-Erbitux-LC-IRES-HC-Y104D(GAT)
  sig_peptide (1126)...(1191): light chain signal sequence
  V_region (1192)...(1512): light chain variable domain
  C_region (1513)...(1833): light chain constant domain
  RBS (1876)...(2450): IRES
  sig_peptide (2464)...(2520): heavy chain signal sequence
  V_region (2521)...(2877): heavy chain variable domain
  C_region (2878)...(3867): heavy chain constant domain
  misc_feature (3868)...(3891): Flag tag
gacggatcgggagatcttcaatattggccattagccatattattcattggttatatagcataaatcaatattggctattggccattgcatacgttgtatctatatcataatatgtacatttatattggctcatgtccaatatgaccgccatgttggcattgattattgactagttattaatagtaatcaattacggggtcattagttcatagcccatatatggagttccgcgttacataacttacggtaaatggcccgcctggctgaccgcccaacgacccccgcccattgacgtcaataatgacgtatgttcccatagtaacgccaatagggactttccattgacgtcaatgggtggagtatttacggtaaactgcccacttggcagtacatcaagtgtatcatatgccaagtccgccccctattgacgtcaatgacggtaaatggcccgcctggcattatgcccagtacatgaccttacgggactttcctacttggcagtacatctacgtattagtcatcgctattaccatggtgatgcggttttggcagtacaccaattggcgtggatagcggtttgactcacggggatttccaagtctccaccccattgacgtcaatgggagtttgttttggcaccaaaatcaacgggactttccaaaatgtcgtaacaactgcgatcgcccgccccgttgacgcaaatgggcggtaggcgtgtacggtgggaggtctatataagcagagctcgtttagtgaaccgtcagatcactagaagctttattgcggtagtttatcacagttaaattgctaacgcagtcagtgcttctgacacaacagtctcgaacttaagctgcagtgactctcttaaggtagccttgcagaagttggtcgtgaggcactgggcaggtaagtatcaaggttacaagacaggtttaaggtgaccaatagaaactgggcttgtcgagacagagaagactcttgcgtttctgataggcacctattggtcttactgacatccactttgcctttctctccacaggtgtccactcccagttcaattacagctcttaaggctagagtacttaatacgactcactataggctagtctcgtcgacgagactagcatggacatgagggtccccgctcagctcctggggctcctgctgctctggctcccaggtgccaagtgtgacatcttgctgactcagtctccagtcatcctgtctgtgagtccaggagaaagagtcagtttctcctgcagggccagtcagagtattggcacaaacatacactggtatcagcaaagaacaaatggttctccaaggcttctcataaagtatgcttctgagtctatctctgggatcccttccaggtttagtggcagtggatcagggacagattttactcttagcatcaacagtgtggagtctgaagatattgcagattattactgtcaacaaaataataactggccaaccacgttcggccaagggaccaaggtggaaatcaaacgtacggtggctgcaccatctgtcttcatcttcccgccatctgatgagcagttgaaatctggaactgcctctgttgtgtgcctgctgaataacttctatcccagagaggccaaagtacagtggaaggtggataacgccctccaatcgggtaactcccaggagagtgtcacagagcaggacagcaaggacagcacctacagcctcagcagcaccctgacgctgagcaaagcagactacgagaaacacaaagtctacgcctgcgaagtcacccatcagggcctgagctcgcccgtcacaaagagcttcaacaggggagagtgttgactcgaggcgcgccgagcatgcatctagggcggccaattccgcccctctccccccccccccctaacgttactggccgaagccgcttggaataaggccggtgtgcgtttgtctatatgttattttccaccatattgccgtcttttggcaatgtgagggcccggaaacctggccctgtcttcttgacgagcattcctaggggtctttcccctctcgccaaaggaatgcaaggtctgttgaatgtcgtgaaggaagcagttcctctggaagcttcttgaagacaaacaacgtctgtagcgaccctttgcaggcagcggaaccccccacctggcgacaggtgcctctgcggccaaaagccacgtgtataagatacacctgcaaaggcggcacaaccccagtgccacgttgtgagttggatagttgtggaaagagtcaaatggctctcctcaagcgtattcaacaaggggctgaaggatgcccagaaggtaccccattgtatgggatctgatctggggcctcggtgcacatgctttacatgtgtttagtcgaggttaaaaaaacgtctaggccccccgaaccacggggacgtggttttcctttgaaaaacacgatgataatatggccacaaccatggagtttgggctgagctggctttttcttgtggctattttaaaaggtgtccagtgtcaggtgcagctgaagcagtcaggacctggcctagtgcagccctcacagagcctgtccatcacctgcacagtctctggtttctcattaactaactatggtgtacactgggttcgccagtctccaggaaagggtctggagtggctgggagtgatatggagtggtggaaacacagactataatacacctttcacatccagactgagcatcaacaaggacaattccaagagccaagttttctttaaaatgaacagtctgcaatctaatgacacagccatatattactgtgccagagccctcacctactatgatgatgagtttgcttactggggccagggaacgctggtcaccgtcagctcagcctccaccaagggcccatcggtcttccccctggcaccctcctccaagagcacctctgggggcacagcggccctgggctgcctggtcaaggactacttccccgaaccggtgacggtgtcgtggaactcaggcgccctgaccagcggcgtgcacaccttcccggctgtcctacagtcctcaggactctactccctcagcagcgtggtgaccgtgccctccagcagcttgggcacccagacctacatctgcaacgtgaatcacaagcccagcaacaccaaggtggacaagaaagttgagcccaaatcttgtgacaaaactcacacatgcccaccgtgcccagcacctgaactcctggggggaccgtcagtcttcctcttccccccaaaacccaaggacaccctcatgatctcccggacccctgaggtcacatgcgtggtggtggacgtgagccacgaagaccctgaggtcaagttcaactggtacgtggacggcgtggaggtgcataatgccaagacaaagccgcgggaggagcagtacaacagcacgtaccgtgtggtcagcgtcctcaccgtcctgcaccaggactggctgaatggcaaggagtacaagtgcaaggtcagcaacaaagccctcccagcccccatcgagaaaaccatctccaaagccaaagggcagccccgagaaccacaggtgtacaccctgcccccatcccgggatgagctgaccaagaaccaggtcagcctgacctgcctggtcaaaggcttctatcccagcgacatcgccgtggagtgggagagcaatgggcagccggagaacaactacaagaccacgcctcccgtgctggactccgacggctccttcttcctctacagcaagctcaccgtggacaagagcaggtggcagcaggggaacgtcttctcatgctccgtgatgcatgaggctctgcacaaccactacacgcagaagagcctctccctgtctccgggtaaagattacaaggatgacgacgataagtgagcggccgctcgagtctagagggcccgtttaaacccgctgatcagcctcgactgtgccttctagttgccagccatctgttgtttgcccctcccccgtgccttccttgaccctggaaggtgccactcccactgtcctttcctaataaaatgaggaaattgcatcgcattgtctgagtaggtgtcattctattctggggggtggggtggggcaggacagcaagggggaggattgggaagacaatagcaggcatgctggggatgcggtgggctctatggcttctgaggcggaaagaaccagctggggctctagggggtatccccacgcgccctgtagcggcgcattaagcgcggcgggtgtggtggttacgcgcagcgtgaccgctacacttgccagcgccctagcgcccgctcctttcgctttcttcccttcctttctcgccacgttcgccggctttccccgtcaagctctaaatcgggggctccctttagggttccgatttagtgctttacggcacctcgaccccaaaaaacttgattagggtgatggttcacgtagtgggccatcgccctgatagacggtttttcgccctttgacgttggagtccacgttctttaatagtggactcttgttccaaactggaacaacactcaaccctatctcggtctattcttttgatttataagggattttgccgatttcggcctattggttaaaaaatgagctgatttaacaaaaatttaacgcgaattaattctgtggaatgtgtgtcagttagggtgtggaaagtccccaggctccccagcaggcagaagtatgcaaagcatgcatctcaattagtcagcaaccaggtgtggaaagtccccaggctccccagcaggcagaagtatgcaaagcatgcatctcaattagtcagcaaccatagtcccgcccctaactccgcccatcccgcccctaactccgcccagttccgcccattctccgccccatggctgactaattttttttatttatgcagaggccgaggccgcctctgcctctgagctattccagaagtagtgaggaggcttttttggaggcctaggcttttgcaaaaagctcccgggagcttgtatatccattttcggatctgatcaagagacaggatgaggatcgtttcgcatgattgaacaagatggattgcacgcaggttctccggccgcttgggtggagaggctattcggctatgactgggcacaacagacaatcggctgctctgatgccgccgtgttccggctgtcagcgcaggggcgcccggttctttttgtcaagaccgacctgtccggtgccctgaatgaactgcaggacgaggcagcgcggctatcgtggctggccacgacgggcgttccttgcgcagctgtgctcgacgttgtcactgaagcgggaagggactggctgctattgggcgaagtgccggggcaggatctcctgtcatctcaccttgctcctgccgagaaagtatccatcatggctgatgcaatgcggcggctgcatacgcttgatccggctacctgcccattcgaccaccaagcgaaacatcgcatcgagcgagcacgtactcggatggaagccggtcttgtcgatcaggatgatctggacgaagagcatcaggggctcgcgccagccgaactgttcgccaggctcaaggcgcgcatgcccgacggcgaggatctcgtcgtgacccatggcgatgcctgcttgccgaatatcatggtggaaaatggccgcttttctggattcatcgactgtggccggctgggtgtggcggaccgctatcaggacatagcgttggctacccgtgatattgctgaagagcttggcggcgaatgggctgaccgcttcctcgtgctttacggtatcgccgctcccgattcgcagcgcatcgccttctatcgccttcttgacgagttcttctgagcgggactctggggttcgaaatgaccgaccaagcgacgcccaacctgccatcacgagatttcgattccaccgccgccttctatgaaaggttgggcttcggaatcgttttccgggacgccggctggatgatcctccagcgcggggatctcatgctggagttcttcgcccaccccaacttgtttattgcagcttataatggttacaaataaagcaatagcatcacaaatttcacaaataaagcatttttttcactgcattctagttgtggtttgtccaaactcatcaatgtatcttatcatgtctgtataccgtcgacctctagctagagcttggcgtaatcatggtcatagctgtttcctgtgtgaaattgttatccgctcacaattccacacaacatacgagccggaagcataaagtgtaaagcctggggtgcctaatgagtgagctaactcacattaattgcgttgcgctcactgcccgctttccagtcgggaaacctgtcgtgccagctgcattaatgaatcggccaacgcgcggggagaggcggtttgcgtattgggcgctcttccgcttcctcgctcactgactcgctgcgctcggtcgttcggctgcggcgagcggtatcagctcactcaaaggcggtaatacggttatccacagaatcaggggataacgcaggaaagaacatgtgagcaaaaggccagcaaaaggccaggaaccgtaaaaaggccgcgttgctggcgtttttccataggctccgcccccctgacgagcatcacaaaaatcgacgctcaagtcagaggtggcgaaacccgacaggactataaagataccaggcgtttccccctggaagctccctcgtgcgctctcctgttccgaccctgccgcttaccggatacctgtccgcctttctcccttcgggaagcgtggcgctttctcatagctcacgctgtaggtatctcagttcggtgtaggtcgttcgctccaagctgggctgtgtgcacgaaccccccgttcagcccgaccgctgcgccttatccggtaactatcgtcttgagtccaacccggtaagacacgacttatcgccactggcagcagccactggtaacaggattagcagagcgaggtatgtaggcggtgctacagagttcttgaagtggtggcctaactacggctacactagaagaacagtatttggtatctgcgctctgctgaagccagttaccttcggaaaaagagttggtagctcttgatccggcaaacaaaccaccgctggtagcggtttttttgtttgcaagcagcagattacgcgcagaaaaaaaggatctcaagaagatcctttgatcttttctacggggtctgacgctcagtggaacgaaaactcacgttaagggattttggtcatgagattatcaaaaaggatcttcacctagatccttttaaattaaaaatgaagttttaaatcaatctaaagtatatatgagtaaacttggtctgacagttaccaatgcttaatcagtgaggcacctatctcagcgatctgtctatttcgttcatccatagttgcctgactccccgtcgtgtagataactacgatacgggagggcttaccatctggccccagtgctgcaatgataccgcgagacccacgctcaccggctccagatttatcagcaataaaccagccagccggaagggccgagcgcagaagtggtcctgcaactttatccgcctccatccagtctattaattgttgccgggaagctagagtaagtagttcgccagttaatagtttgcgcaacgttgttgccattgctacaggcatcgtggtgtcacgctcgtcgtttggtatggcttcattcagctccggttcccaacgatcaaggcgagttacatgatcccccatgttgtgcaaaaaagcggttagctccttcggtcctccgatcgttgtcagaagtaagttggccgcagtgttatcactcatggttatggcagcactgcataattctcttactgtcatgccatccgtaagatgcttttctgtgactggtgagtactcaaccaagtcattctgagaatagtgtatgcggcgaccgagttgctcttgcccggcgtcaatacgggataataccgcgccacatagcagaactttaaaagtgctcatcattggaaaacgttcttcggggcgaaaactctcaaggatcttaccgctgttgagatccagttcgatgtaacccactcgtgcacccaactgatcttcagcatcttttactttcaccagcgtttctgggtgagcaaaaacaggaaggcaaaatgccgcaaaaaagggaataagggcgacacggaaatgttgaatactcatactcttcctttttcaatattattgaagcatttatcagggttattgtctcatgagcggatacatatttgaatgtatttagaaaaataaacaaataggggttccgcgcacatttccccgaaaagtgccacctgacgtc

SEQ ID NO: 308 - DNA, 8345 bp, Artificial Sequence
  pcDNA3-Erbitux-LC-IRES-HC-Y104D(GAC)
  sig_peptide (1126)...(1191): light chain signal sequence
  V_region (1192)...(1512): light chain variable domain
  C_region (1513)...(1833): light chain constant domain
  RBS (1876)...(2450): IRES
  sig_peptide (2464)...(2520): heavy chain signal sequence
  V_region (2521)...(2877): heavy chain variable domain
  C_region (2878)...(3867): heavy chain constant domain
  misc_feature (3868)...(3891): Flag tag
gacggatcgggagatcttcaatattggccattagccatattattcattggttatatagcataaatcaatattggctattggccattgcatacgttgtatctatatcataatatgtacatttatattggctcatgtccaatatgaccgccatgttggcattgattattgactagttattaatagtaatcaattacggggtcattagttcatagcccatatatggagttccgcgttacataacttacggtaaatggcccgcctggctgaccgcccaacgacccccgcccattgacgtcaataatgacgtatgttcccatagtaacgccaatagggactttccattgacgtcaatgggtggagtatttacggtaaactgcccacttggcagtacatcaagtgtatcatatgccaagtccgccccctattgacgtcaatgacggtaaatggcccgcctggcattatgcccagtacatgaccttacgggactttcctacttggcagtacatctacgtattagtcatcgctattaccatggtgatgcggttttggcagtacaccaattggcgtggatagcggtttgactcacggggatttccaagtctccaccccattgacgtcaatgggagtttgttttggcaccaaaatcaacgggactttccaaaatgtcgtaacaactgcgatcgcccgccccgttgacgcaaatgggcggtaggcgtgtacggtgggaggtctatataagcagagctcgtttagtgaaccgtcagatcactagaagctttattgcggtagtttatcacagttaaattgctaacgcagtcagtgcttctgacacaacagtctcgaacttaagctgcagtgactctcttaaggtagccttgcagaagttggtcgtgaggcactgggcaggtaagtatcaaggttacaagacaggtttaaggtgaccaatagaaactgggcttgtcgagacagagaagactcttgcgtttctgataggcacctattggtcttactgacatccactttgcctttctctccacaggtgtccactcccagttcaattacagctcttaaggctagagtacttaatacgactcactataggctagtctcgtcgacgagactagcatggacatgagggtccccgctcagctcctggggctcctgctgctctggctcccaggtgccaagtgtgacatcttgctgactcagtctccagtcatcctgtctgtgagtccaggagaaagagtcagtttctcctgcagggccagtcagagtattggcacaaacatacactggtatcagcaaagaacaaatggttctccaaggcttctcataaagtatgcttctgagtctatctctgggatcccttccaggtttagtggcagtggatcagggacagattttactcttagcatcaacagtgtggagtctgaagatattgcagattattactgtcaacaaaataataactggccaaccacgttcggccaagggaccaaggtggaaatcaaacgtacggtggctgcaccatctgtcttcatcttcccgccatctgatgagcagttgaaatctggaactgcctctgttgtgtgcctgctgaataacttctatcccagagaggccaaagtacagtggaaggtggataacgccctccaatcgggtaactcccaggagagtgtcacagagcaggacagcaaggacagcacctacagcctcagcagcaccctgacgctgagcaaagcagactacgagaaacacaaagtctacgcctgcgaagtcacccatcagggcctgagctcgcccgtcacaaagagcttcaacaggggagagtgttgactcgaggcgcgccgagcatgcatctagggcggccaattccgcccctctccccccccccccctaacgttactggccgaagccgcttggaataaggccggtgtgcgtttgtctatatgttattttccaccatattgccgtcttttggcaatgtgagggcccggaaacctggccctgtcttcttgacgagcattcctaggggtctttcccctctcgccaaaggaatgcaaggtctgttgaatgtcgtgaaggaagcagttcctctggaagcttcttgaagacaaacaacgtctgtagcgaccctttgcaggcagcggaaccccccacctggcgacaggtgcctctgcggccaaaagccacgtgtataagatacacctgcaaaggcggcacaaccccagtgccacgttgtgagttggatagttgtggaaagagtcaaatggctctcctcaagcgtattcaacaaggggctgaaggatgcccagaaggtaccccattgtatgggatctgatctggggcctcggtgcacatgctttacatgtgtttagtcgaggttaaaaaaacgtctaggccccccgaaccacggggacgtggttttcctttgaaaaacacgatgataatatggccacaaccatggagtttgggctgagctggctttttcttgtggctattttaaaaggtgtccagtgtcaggtgcagctgaagcagtcaggacctggcctagtgcagccctcacagagcctgtccatcacctgcacagtctctggtttctcattaactaactatggtgtacactgggttcgccagtctccaggaaagggtctggagtggctgggagtgatatggagtggtggaaacacagactataatacacctttcacatccagactgagcatcaacaaggacaattccaagagccaagttttctttaaaatgaacagtctgcaatctaatgacacagccatatattactgtgccagagccctcacctactatgatgacgagtttgcttactggggccagggaacgctggtcaccgtcagctcagcctccaccaagggcccatcggtcttccccctggcaccctcctccaagagcacctctgggggcacagcggccctgggctgcctggtcaaggactacttccccgaaccggtgacggtgtcgtggaactcaggcgccctgaccagcggcgtgcacaccttcccggctgtcctacagtcctcaggactctactccctcagcagcgtggtgaccgtgccctccagcagcttgggcacccagacctacatctgcaacgtgaatcacaagcccagcaacaccaaggtggacaagaaagttgagcccaaatcttgtgacaaaactcacacatgcccaccgtgcccagcacctgaactcctggggggaccgtcagtcttcctcttccccccaaaacccaaggacaccctcatgatctcccggacccctgaggtcacatgcgtggtggtggacgtgagccacgaagaccctgaggtcaagttcaactggtacgtggacggcgtggaggtgcataatgccaagacaaagccgcgggaggagcagtacaacagcacgtaccgtgtggtcagcgtcctcaccgtcctgcaccaggactggctgaatggcaaggagtacaagtgcaaggtcagcaacaaagccctcccagcccccatcgagaaaaccatctccaaagccaaagggcagccccgagaaccacaggtgtacaccctgcccccatcccgggatgagctgaccaagaaccaggtcagcctgacctgcctggtcaaaggcttctatcccagcgacatcgccgtggagtgggagagcaatgggcagccggagaacaactacaagaccacgcctcccgtgctggactccgacggctccttcttcctctacagcaagctcaccgtggacaagagcaggtggcagcaggggaacgtcttctcatgctccgtgatgcatgaggctctgcacaaccactacacgcagaagagcctctccctgtctccgggtaaagattacaaggatgacgacgataagtgagcggccgctcgagtctagagggcccgtttaaacccgctgatcagcctcgactgtgccttctagttgccagccatctgttgtttgcccctcccccgtgccttccttgaccctggaaggtgccactcccactgtcctttcctaataaaatgaggaaattgcatcgcattgtctgagtaggtgtcattctattctggggggtggggtggggcaggacagcaagggggaggattgggaagacaatagcaggcatgctggggatgcggtgggctctatggcttctgaggcggaaagaaccagctggggctctagggggtatccccacgcgccctgtagcggcgcattaagcgcggcgggtgtggtggttacgcgcagcgtgaccgctacacttgccagcgccctagcgcccgctcctttcgctttcttcccttcctttctcgccacgttcgccggctttccccgtcaagctctaaatcgggggctccctttagggttccgatttagtgctttacggcacctcgaccccaaaaaacttgattagggtgatggttcacgtagtgggccatcgccctgatagacggtttttcgccctttgacgttggagtccacgttctttaatagtggactcttgttccaaactggaacaacactcaaccctatctcggtctattcttttgatttataagggattttgccgatttcggcctattggttaaaaaatgagctgatttaacaaaaatttaacgcgaattaattctgtggaatgtgtgtcagttagggtgtggaaagtccccaggctccccagcaggcagaagtatgcaaagcatgcatctcaattagtcagcaaccaggtgtggaaagtccccaggctccccagcaggcagaagtatgcaaagcatgcatctcaattagtcagcaaccatagtcccgcccctaactccgcccatcccgcccctaactccgcccagttccgcccattctccgccccatggctgactaattttttttatttatgcagaggccgaggccgcctctgcctctgagctattccagaagtagtgaggaggcttttttggaggcctaggcttttgcaaaaagctcccgggagcttgtatatccattttcggatctgatcaagagacaggatgaggatcgtttcgcatgattgaacaagatggattgcacgcaggttctccggccgcttgggtggagaggctattcggctatgactgggcacaacagacaatcggctgctctgatgccgccgtgttccggctgtcagcgcaggggcgcccggttctttttgtcaagaccgacctgtccggtgccctgaatgaactgcaggacgaggcagcgcggctatcgtggctggccacgacgggcgttccttgcgcagctgtgctcgacgttgtcactgaagcgggaagggactggctgctattgggcgaagtgccggggcaggatctcctgtcatctcaccttgctcctgccgagaaagtatccatcatggctgatgcaatgcggcggctgcatacgcttgatccggctacctgcccattcgaccaccaagcgaaacatcgcatcgagcgagcacgtactcggatggaagccggtcttgtcgatcaggatgatctggacgaagagcatcaggggctcgcgccagccgaactgttcgccaggctcaaggcgcgcatgcccgacggcgaggatctcgtcgtgacccatggcgatgcctgcttgccgaatatcatggtggaaaatggccgcttttctggattcatcgactgtggccggctgggtgtggcggaccgctatcaggacatagcgttggctacccgtgatattgctgaagagcttggcggcgaatgggctgaccgcttcctcgtgctttacggtatcgccgctcccgattcgcagcgcatcgccttctatcgccttcttgacgagttcttctgagcgggactctggggttcgaaatgaccgaccaagcgacgcccaacctgccatcacgagatttcgattccaccgccgccttctatgaaaggttgggcttcggaatcgttttccgggacgccggctggatgatcctccagcgcggggatctcatgctggagttcttcgcccaccccaacttgtttattgcagcttataatggttacaaataaagcaatagcatcacaaatttcacaaataaagcatttttttcactgcattctagttgtggtttgtccaaactcatcaatgtatcttatcatgtctgtataccgtcgacctctagctagagcttggcgtaatcatggtcatagctgtttcctgtgtgaaattgttatccgctcacaattccacacaacatacgagccggaagcataaagtgtaaagcctggggtgcctaatgagtgagctaactcacattaattgcgttgcgctcactgcccgctttccagtcgggaaacctgtcgtgccagctgcattaatgaatcggccaacgcgcggggagaggcggtttgcgtattgggcgctcttccgcttcctcgctcactgactcgctgcgctcggtcgttcggctgcggcgagcggtatcagctcactcaaaggcggtaatacggttatccacagaatcaggggataacgcaggaaagaacatgtgagcaaaaggccagcaaaaggccaggaaccgtaaaaaggccgcgttgctggcgtttttccataggctccgcccccctgacgagcatcacaaaaatcgacgctcaagtcagaggtggcgaaacccgacaggactataaagataccaggcgtttccccctggaagctccctcgtgcgctctcctgttccgaccctgccgcttaccggatacctgtccgcctttctcccttcgggaagcgtggcgctttctcatagctcacgctgtaggtatctcagttcggtgtaggtcgttcgctccaagctgggctgtgtgcacgaaccccccgttcagcccgaccgctgcgccttatccggtaactatcgtcttgagtccaacccggtaagacacgacttatcgccactggcagcagccactggtaacaggattagcagagcgaggtatgtaggcggtgctacagagttcttgaagtggtggcctaactacggctacactagaagaacagtatttggtatctgcgctctgctgaagccagttaccttcggaaaaagagttggtagctcttgatccggcaaacaaaccaccgctggtagcggtttttttgtttgcaagcagcagattacgcgcagaaaaaaaggatctcaagaagatcctttgatcttttctacggggtctgacgctcagtggaacgaaaactcacgttaagggattttggtcatgagattatcaaaaaggatcttcacctagatccttttaaattaaaaatgaagttttaaatcaatctaaagtatatatgagtaaacttggtctgacagttaccaatgcttaatcagtgaggcacctatctcagcgatctgtctatttcgttcatccatagttgcctgactccccgtcgtgtagataactacgatacgggagggcttaccatctggccccagtgctgcaatgataccgcgagacccacgctcaccggctccagatttatcagcaataaaccagccagccggaagggccgagcgcagaagtggtcctgcaactttatccgcctccatccagtctattaattgttgccgggaagctagagtaagtagttcgccagttaatagtttgcgcaacgttgttgccattgctacaggcatcgtggtgtcacgctcgtcgtttggtatggcttcattcagctccggttcccaacgatcaaggcgagttacatgatcccccatgttgtgcaaaaaagcggttagctccttcggtcctccgatcgttgtcagaagtaagttggccgcagtgttatcactcatggttatggcagcactgcataattctcttactgtcatgccatccgtaagatgcttttctgtgactggtgagtactcaaccaagtcattctgagaatagtgtatgcggcgaccgagttgctcttgcccggcgtcaatacgggataataccgcgccacatagcagaactttaaaagtgctcatcattggaaaacgttcttcggggcgaaaactctcaaggatcttaccgctgttgagatccagttcgatgtaacccactcgtgcacccaactgatcttcagcatcttttactttcaccagcgtttctgggtgagcaaaaacaggaaggcaaaatgccgcaaaaaagggaataagggcgacacggaaatgttgaatactcatactcttcctttttcaatattattgaagcatttatcagggttattgtctcatgagcggatacatatttgaatgtatttagaaaaataaacaaataggggttccgcgcacatttccccgaaaagtgccacctgacgtc

SEQ ID NO: 309 - DNA, 8345 bp, Artificial Sequence
  pcDNA3-Erbitux-LC-IRES-HC-Y104E(GAA)
  sig_peptide (1126)...(1191): light chain signal sequence
  V_region (1192)...(1512): light chain variable domain
  C_region (1513)...(1833): light chain constant domain
  RBS (1876)...(2450): IRES
  sig_peptide (2464)...(2520): heavy chain signal sequence
  V_region (2521)...(2877): heavy chain variable domain
  C_region (2878)...(3867): heavy chain constant domain
  misc_feature (3868)...(3891): Flag tag
gacggatcgggagatcttcaatattggccattagccatattattcattggttatatagcataaatcaatattggctattggccattgcatacgttgtatctatatcataatatgtacatttatattggctcatgtccaatatgaccgccatgttggcattgattattgactagttattaatagtaatcaattacggggtcattagttcatagcccatatatggagttccgcgttacataacttacggtaaatggcccgcctggctgaccgcccaacgacccccgcccattgacgtcaataatgacgtatgttcccatagtaacgccaatagggactttccattgacgtcaatgggtggagtatttacggtaaactgcccacttggcagtacatcaagtgtatcatatgccaagtccgccccctattgacgtcaatgacggtaaatggcccgcctggcattatgcccagtacatgaccttacgggactttcctacttggcagtacatctacgtattagtcatcgctattaccatggtgatgcggttttggcagtacaccaattggcgtggatagcggtttgactcacggggatttccaagtctccaccccattgacgtcaatgggagtttgttttggcaccaaaatcaacgggactttccaaaatgtcgtaacaactgcgatcgcccgccccgttgacgcaaatgggcggtaggcgtgtacggtgggaggtctatataagcagagctcgtttagtgaaccgtcagatcactagaagctttattgcggtagtttatcacagttaaattgctaacgcagtcagtgcttctgacacaacagtctcgaacttaagctgcagtgactctcttaaggtagccttgcagaagttggtcgtgaggcactgggcaggtaagtatcaaggttacaagacaggtttaaggtgaccaatagaaactgggcttgtcgagacagagaagactcttgcgtttctgataggcacctattggtcttactgacatccactttgcctttctctccacaggtgtccactcccagttcaattacagctcttaaggctagagtacttaatacgactcactataggctagtctcgtcgacgagactagcatggacatgagggtccccgctcagctcctggggctcctgctgctctggctcccaggtgccaagtgtgacatcttgctgactcagtctccagtcatcctgtctgtgagtccaggagaaagagtcagtttctcctgcagggccagtcagagtattggcacaaacatacactggtatcagcaaagaacaaatggttctccaaggcttctcataaagtatgcttctgagtctatctctgggatcccttccaggtttagtggcagtggatcagggacagattttactcttagcatcaacagtgtggagtctgaagatattgcagattattactgtcaacaaaataataactggccaaccacgttcggccaagggaccaaggtggaaatcaaacgtacggtggctgcaccatctgtcttcatcttcccgccatctgatgagcagttgaaatctggaactgcctctgttgtgtgcctgctgaataacttctatcccagagaggccaaagtacagtggaaggtggataacgccctccaatcgggtaactcccaggagagtgtcacagagcaggacagcaaggacagcacctacagcctcagcagcaccctgacgctgagcaaagcagactacgagaaacacaaagtctacgcctgcgaagtcacccatcagggcctgagctcgcccgtcacaaagagcttcaacaggggagagtgttgactcgaggcgcgccgagcatgcatctagggcggccaattccgcccctctccccccccccccctaacgttactggccgaagccgcttggaataaggccggtgtgcgtttgtctatatgttattttccaccatattgccgtcttttggcaatgtgagggcccggaaacctggccctgtcttcttgacgagcattcctaggggtctttcccctctcgccaaaggaatgcaaggtctgttgaatgtcgtgaaggaagcagttcctctggaagcttcttgaagacaaacaacgtctgtagcgaccctttgcaggcagcggaaccccccacctggcgacaggtgcctctgcggccaaaagccacgtgtataagatacacctgcaaaggcggcacaaccccagtgccacgttgtgagttggatagttgtggaaagagtcaaatggctctcctcaagcgtattcaacaaggggctgaaggatgcccagaaggtaccccattgtatgggatctgatctggggcctcggtgcacatgctttacatgtgtttagtcgaggttaaaaaaacgtctaggccccccgaaccacggggacgtggttttcctttgaaaaacacgatgataatatggccacaaccatggagtttgggctgagctggctttttcttgtggctattttaaaaggtgtccagtgtcaggtgcagctgaagcagtcaggacctggcctagtgcagccctcacagagcctgtccatcacctgcacagtctctggtttctcattaactaactatggtgtacactgggttcgccagtctccaggaaagggtctggagtggctgggagtgatatggagtggtggaaacacagactataatacacctttcacatccagactgagcatcaacaaggacaattccaagagccaagttttctttaaaatgaacagtctgcaatctaatgacacagccatatattactgtgccagagccctcacctactatgatgaagagtttgcttactggggccagggaacgctggtcaccgtcagctcagcctccaccaagggcccatcggtcttccccctggcaccctcctccaagagcacctctgggggcacagcggccctgggctgcctggtcaaggactacttccccgaaccggtgacggtgtcgtggaactcaggcgccctgaccagcggcgtgcacaccttcccggctgtcctacagtcctcaggactctactccctcagcagcgtggtgaccgtgccctccagcagcttgggcacccagacctacatctgcaacgtgaatcacaagcccagcaacaccaaggtggacaagaaagttgagcccaaatcttgtgacaaaactcacacatgcccaccgtgcccagcacctgaactcctggggggaccgtcagtcttcctcttccccccaaaacccaaggacaccctcatgatctcccggacccctgaggtcacatgcgtggtggtggacgtgagccacgaagaccctgaggtcaagttcaactggtacgtggacggcgtggaggtgcataatgccaagacaaagccgcgggaggagcagtacaacagcacgtaccgtgtggtcagcgtcctcaccgtcctgcaccaggactggctgaatggcaaggagtacaagtgcaaggtcagcaacaaagccctcccagcccccatcgagaaaaccatctccaaagccaaagggcagccccgagaaccacaggtgtacaccctgcccccatcccgggatgagctgaccaagaaccaggtcagcctgacctgcctggtcaaaggcttctatcccagcgacatcgccgtggagtgggagagcaatgggcagccggagaacaactacaagaccacgcctcccgtgctggactccgacggctccttcttcctctacagcaagctcaccgtggacaagagcaggtggcagcaggggaacgtcttctcatgctccgtgatgcatgaggctctgcacaaccactacacgcagaagagcctctccctgtctccgggtaaagattacaaggatgacgacgataagtgagcggccgctcgagtctagagggcccgtttaaacccgctgatcagcctcgactgtgccttctagttgccagccatctgttgtttgcccctcccccgtgccttccttgaccctggaaggtgccactcccactgtcctttcctaataaaatgaggaaattgcatcgcattgtctgagtaggtgtcattctattctggggggtggggtggggcaggacagcaagggggaggattgggaagacaatagcaggcatgctggggatgcggtgggctctatggcttctgaggcggaaagaaccagctggggctctagggggtatccccacgcgccctgtagcggcgcattaagcgcggcgggtgtggtggttacgcgcagcgtgaccgctacacttgccagcgccctagcgcccgctcctttcgctttcttcccttcctttctcgccacgttcgccggctttccccgtcaagctctaaatcgggggctccctttagggttccgatttagtgctttacggcacctcgaccccaaaaaacttgattagggtgatggttcacgtagtgggccatcgccctgatagacggtttttcgccctttgacgttggagtccacgttctttaatagtggactcttgttccaaactggaacaacactcaaccctatctcggtctattcttttgatttataagggattttgccgatttcggcctattggttaaaaaatgagctgatttaacaaaaatttaacgcgaattaattctgtggaatgtgtgtcagttagggtgtggaaagtccccaggctccccagcaggcagaagtatgcaaagcatgcatctcaattagtcagcaaccaggtgtggaaagtccccaggctccccagcaggcagaagtatgcaaagcatgcatctcaattagtcagcaaccatagtcccgcccctaactccgcccatcccgcccctaactccgcccagttccgcccattctccgccccatggctgactaattttttttatttatgcagaggccgaggccgcctctgcctctgagctattccagaagtagtgaggaggcttttttggaggcctaggcttttgcaaaaagctcccgggagcttgtatatccattttcggatctgatcaagagacaggatgaggatcgtttcgcatgattgaacaagatggattgcacgcaggttctccggccgcttgggtggagaggctattcggctatgactgggcacaacagacaatcggctgctctgatgccgccgtgttccggctgtcagcgcaggggcgcccggttctttttgtcaagaccgacctgtccggtgccctgaatgaactgcaggacgaggcagcgcggctatcgtggctggccacgacgggcgttccttgcgcagctgtgctcgacgttgtcactgaagcgggaagggactggctgctattgggcgaagtgccggggcaggatctcctgtcatctcaccttgctcctgccgagaaagtatccatcatggctgatgcaatgcggcggctgcatacgcttgatccggctacctgcccattcgaccaccaagcgaaacatcgcatcgagcgagcacgtactcggatggaagccggtcttgtcgatcaggatgatctggacgaagagcatcaggggctcgcgccagccgaactgttcgccaggctcaaggcgcgcatgcccgacggcgaggatctcgtcgtgacccatggcgatgcctgcttgccgaatatcatggtggaaaatggccgcttttctggattcatcgactgtggccggctgggtgtggcggaccgctatcaggacatagcgttggctacccgtgatattgctgaagagcttggcggcgaatgggctgaccgcttcctcgtgctttacggtatcgccgctcccgattcgcagcgcatcgccttctatcgccttcttgacgagttcttctgagcgggactctggggttcgaaatgaccgaccaagcgacgcccaacctgccatcacgagatttcgattccaccgccgccttctatgaaaggttgggcttcggaatcgttttccgggacgccggctggatgatcctccagcgcggggatctcatgctggagttcttcgcccaccccaacttgtttattgcagcttataatggttacaaataaagcaatagcatcacaaatttcacaaataaagcatttttttcactgcattctagttgtggtttgtccaaactcatcaatgtatcttatcatgtctgtataccgtcgacctctagctagagcttggcgtaatcatggtcatagctgtttcctgtgtgaaattgttatccgctcacaattccacacaacatacgagccggaagcataaagtgtaaagcctggggtgcctaatgagtgagctaactcacattaattgcgttgcgctcactgcccgctttccagtcgggaaacctgtcgtgccagctgcattaatgaatcggccaacgcgcggggagaggcggtttgcgtattgggcgctcttccgcttcctcgctcactgactcgctgcgctcggtcgttcggctgcggcgagcggtatcagctcactcaaaggcggtaatacggttatccacagaatcaggggataacgcaggaaagaacatgtgagcaaaaggccagcaaaaggccaggaaccgtaaaaaggccgcgttgctggcgtttttccataggctccgcccccctgacgagcatcacaaaaatcgacgctcaagtcagaggtggcgaaacccgacaggactataaagataccaggcgtttccccctggaagctccctcgtgcgctctcctgttccgaccctgccgcttaccggatacctgtccgcctttctcccttcgggaagcgtggcgctttctcatagctcacgctgtaggtatctcagttcggtgtaggtcgttcgctccaagctgggctgtgtgcacgaaccccccgttcagcccgaccgctgcgccttatccggtaactatcgtcttgagtccaacccggtaagacacgacttatcgccactggcagcagccactggtaacaggattagcagagcgaggtatgtaggcggtgctacagagttcttgaagtggtggcctaactacggctacactagaagaacagtatttggtatctgcgctctgctgaagccagttaccttcggaaaaagagttggtagctcttgatccggcaaacaaaccaccgctggtagcggtttttttgtttgcaagcagcagattacgcgcagaaaaaaaggatctcaagaagatcctttgatcttttctacggggtctgacgctcagtggaacgaaaactcacgttaagggattttggtcatgagattatcaaaaaggatcttcacctagatccttttaaattaaaaatgaagttttaaatcaatctaaagtatatatgagtaaacttggtctgacagttaccaatgcttaatcagtgaggcacctatctcagcgatctgtctatttcgttcatccatagttgcctgactccccgtcgtgtagataactacgatacgggagggcttaccatctggccccagtgctgcaatgataccgcgagacccacgctcaccggctccagatttatcagcaataaaccagccagccggaagggccgagcgcagaagtggtcctgcaactttatccgcctccatccagtctattaattgttgccgggaagctagagtaagtagttcgccagttaatagtttgcgcaacgttgttgccattgctacaggcatcgtggtgtcacgctcgtcgtttggtatggcttcattcagctccggttcccaacgatcaaggcgagttacatgatcccccatgttgtgcaaaaaagcggttagctccttcggtcctccgatcgttgtcagaagtaagttggccgcagtgttatcactcatggttatggcagcactgcataattctcttactgtcatgccatccgtaagatgcttttctgtgactggtgagtactcaaccaagtcattctgagaatagtgtatgcggcgaccgagttgctcttgcccggcgtcaatacgggataataccgcgccacatagcagaactttaaaagtgctcatcattggaaaacgttcttcggggcgaaaactctcaaggatcttaccgctgttgagatccagttcgatgtaacccactcgtgcacccaactgatcttcagcatcttttactttcaccagcgtttctgggtgagcaaaaacaggaaggcaaaatgccgcaaaaaagggaataagggcgacacggaaatgttgaatactcatactcttcctttttcaatattattgaagcatttatcagggttattgtctcatgagcggatacatatttgaatgtatttagaaaaataaacaaataggggttccgcgcacatttccccgaaaagtgccacctgacgtc

SEQ ID NO: 310 - DNA, 8345 bp, Artificial Sequence
  pcDNA3-Erbitux-LC-IRES-HC-Y104E(GAG)
  sig_peptide (1126)...(1191): light chain signal sequence
  V_region (1192)...(1512): light chain variable domain
  C_region (1513)...(1833): light chain constant domain
  RBS (1876)...(2450): IRES
  sig_peptide (2464)...(2520): heavy chain signal sequence
  V_region (2521)...(2877): heavy chain variable domain
  C_region (2878)...(3867): heavy chain constant domain
  misc_feature (3868)...(3891): Flag tag
gacggatcgggagatcttcaatattggccattagccatattattcattggttatatagcataaatcaatattggctattggccattgcatacgttgtatctatatcataatatgtacatttatattggctcatgtccaatatgaccgccatgttggcattgattattgactagttattaatagtaatcaattacggggtcattagttcatagcccatatatggagttccgcgttacataacttacggtaaatggcccgcctggctgaccgcccaacgacccccgcccattgacgtcaataatgacgtatgttcccatagtaacgccaatagggactttccattgacgtcaatgggtggagtatttacggtaaactgcccacttggcagtacatcaagtgtatcatatgccaagtccgccccctattgacgtcaatgacggtaaatggcccgcctggcattatgcccagtacatgaccttacgggactttcctacttggcagtacatctacgtattagtcatcgctattaccatggtgatgcggttttggcagtacaccaattggcgtggatagcggtttgactcacggggatttccaagtctccaccccattgacgtcaatgggagtttgttttggcaccaaaatcaacgggactttccaaaatgtcgtaacaactgcgatcgcccgccccgttgacgcaaatgggcggtaggcgtgtacggtgggaggtctatataagcagagctcgtttagtgaaccgtcagatcactagaagctttattgcggtagtttatcacagttaaattgctaacgcagtcagtgcttctgacacaacagtctcgaacttaagctgcagtgactctcttaaggtagccttgcagaagttggtcgtgaggcactgggcaggtaagtatcaaggttacaagacaggtttaaggtgaccaatagaaactgggcttgtcgagacagagaagactcttgcgtttctgataggcacctattggtcttactgacatccactttgcctttctctccacaggtgtccactcccagttcaattacagctcttaaggctagagtacttaatacgactcactataggctagtctcgtcgacgagactagcatggacatgagggtccccgctcagctcctggggctcctgctgctctggctcccaggtgccaagtgtgacatcttgctgactcagtctccagtcatcctgtctgtgagtccaggagaaagagtcagtttctcctgcagggccagtcagagtattggcacaaacatacactggtatcagcaaagaacaaatggttctccaaggcttctcataaagtatgcttctgagtctatctctgggatcccttccaggtttagtggcagtggatcagggacagattttactcttagcatcaacagtgtggagtctgaagatattgcagattattactgtcaacaaaataataactggccaaccacgttcggccaagggaccaaggtggaaatcaaacgtacggtggctgcaccatctgtcttcatcttcccgccatctgatgagcagttgaaatctggaactgcctctgttgtgtgcctgctgaataacttctatcccagagaggccaaagtacagtggaaggtggataacgccctccaatcgggtaactcccaggagagtgtcacagagcaggacagcaaggacagcacctacagcctcagcagcaccctgacgctgagcaaagcagactacgagaaacacaaagtctacgcctgcgaagtcacccatcagggcctgagctcgcccgtcacaaagagcttcaacaggggagagtgttgactcgaggcgcgccgagcatgcatctagggcggccaattccgcccctctccccccccccccctaacgttactggccgaagccgcttggaataaggccggtgtgcgtttgtctatatgttattttccaccatattgccgtcttttggcaatgtgagggcccggaaacctggccctgtcttcttgacgagcattcctaggggtctttcccctctcgccaaaggaatgcaaggtctgttgaatgtcgtgaaggaagcagttcctctggaagcttcttgaagacaaacaacgtctgtagcgaccctttgcaggcagcggaaccccccacctggcgacaggtgcctctgcggccaaaagccacgtgtataagatacacctgcaaaggcggcacaaccccagtgccacgttgtgagttggatagttgtggaaagagtcaaatggctctcctcaagcgtattcaacaaggggctgaaggatgcccagaaggtaccccattgtatgggatctgatctggggcctcggtgcacatgctttacatgtgtttagtcgaggttaaaaaaacgtctaggccccccgaaccacggggacgtggttttcctttgaaaaacacgatgataatatggccacaaccatggagtttgggctgagctggctttttcttgtggctattttaaaaggtgtccagtgtcaggtgcagctgaagcagtcaggacctggcctagtgcagccctcacagagcctgtccatcacctgcacagtctctggtttctcattaactaactatggtgtacactgggttcgccagtctccaggaaagggtctggagtggctgggagtgatatggagtggtggaaacacagactataatacacctttcacatccagactgagcatcaacaaggacaattccaagagccaagttttctttaaaatgaacagtctgcaatctaatgacacagccatatattactgtgccagagccctcacctactatgatgaggagtttgcttactggggccagggaacgctggtcaccgtcagctcagcctccaccaagggcccatcggtcttccccctggcaccctcctccaagagcacctctgggggcacagcggccctgggctgcctggtcaaggactacttccccgaaccggtgacggtgtcgtggaactcaggcgccctgaccagcggcgtgcacaccttcccggctgtcctacagtcctcaggactctactccctcagcagcgtggtgaccgtgccctccagcagcttgggcacccagacctacatctgcaacgtgaatcacaagcccagcaacaccaaggtggacaagaaagttgagcccaaatcttgtgacaaaactcacacatgcccaccgtgcccagcacctgaactcctggggggaccgtcagtcttcctcttccccccaaaacccaaggacaccctcatgatctcccggacccctgaggtcacatgcgtggtggtggacgtgagccacgaagaccctgaggtcaagttcaactggtacgtggacggcgtggaggtgcataatgccaagacaaagccgcgggaggagcagtacaacagcacgtaccgtgtggtcagcgtcctcaccgtcctgcaccaggactggctgaatggcaaggagtacaagtgcaaggtcagcaacaaagccctcccagcccccatcgagaaaaccatctccaaagccaaagggcagccccgagaaccacaggtgtacaccctgcccccatcccgggatgagctgaccaagaaccaggtcagcctgacctgcctggtcaaaggcttctatcccagcgacatcgccgtggagtgggagagcaatgggcagccggagaacaactacaagaccacgcctcccgtgctggactccgacggctccttcttcctctacagcaagctcaccgtggacaagagcaggtggcagcaggggaacgtcttctcatgctccgtgatgcatgaggctctgcacaaccactacacgcagaagagcctctccctgtctccgggtaaagattacaaggatgacgacgataagtgagcggccgctcgagtctagagggcccgtttaaacccgctgatcagcctcgactgtgccttctagttgccagccatctgttgtttgcccctcccccgtgccttccttgaccctggaaggtgccactcccactgtcctttcctaataaaatgaggaaattgcatcgcattgtctgagtaggtgtcattctattctggggggtggggtggggcaggacagcaagggggaggattgggaagacaatagcaggcatgctggggatgcggtgggctctatggcttctgaggcggaaagaaccagctggggctctagggggtatccccacgcgccctgtagcggcgcattaagcgcggcgggtgtggtggttacgcgcagcgtgaccgctacacttgccagcgccctagcgcccgctcctttcgctttcttcccttcctttctcgccacgttcgccggctttccccgtcaagctctaaatcgggggctccctttagggttccgatttagtgctttacggcacctcgaccccaaaaaacttgattagggtgatggttcacgtagtgggccatcgccctgatagacggtttttcgccctttgacgttggagtccacgttctttaatagtggactcttgttccaaactggaacaacactcaaccctatctcggtctattcttttgatttataagggattttgccgatttcggcctattggttaaaaaatgagctgatttaacaaaaatttaacgcgaattaattctgtggaatgtgtgtcagttagggtgtggaaagtccccaggctccccagcaggcagaagtatgcaaagcatgcatctcaattagtcagcaaccaggtgtggaaagtccccaggctccccagcaggcagaagtatgcaaagcatgcatctcaattagtcagcaaccatagtcccgcccctaactccgcccatcccgcccctaactccgcccagttccgcccattctccgccccatggctgactaattttttttatttatgcagaggccgaggccgcctctgcctctgagctattccagaagtagtgaggaggcttttttggaggcctaggcttttgcaaaaagctcccgggagcttgtatatccattttcggatctgatcaagagacaggatgaggatcgtttcgcatgattgaacaagatggattgcacgcaggttctccggccgcttgggtggagaggctattcggctatgactgggcacaacagacaatcggctgctctgatgccgccgtgttccggctgtcagcgcaggggcgcccggttctttttgtcaagaccgacctgtccggtgccctgaatgaactgcaggacgaggcagcgcggctatcgtggctggccacgacgggcgttccttgcgcagctgtgctcgacgttgtcactgaagcgggaagggactggctgctattgggcgaagtgccggggcaggatctcctgtcatctcaccttgctcctgccgagaaagtatccatcatggctgatgcaatgcggcggctgcatacgcttgatccggctacctgcccattcgaccaccaagcgaaacatcgcatcgagcgagcacgtactcggatggaagccggtcttgtcgatcaggatgatctggacgaagagcatcaggggctcgcgccagccgaactgttcgccaggctcaaggcgcgcatgcccgacggcgaggatctcgtcgtgacccatggcgatgcctgcttgccgaatatcatggtggaaaatggccgcttttctggattcatcgactgtggccggctgggtgtggcggaccgctatcaggacatagcgttggctacccgtgatattgctgaagagcttggcggcgaatgggctgaccgcttcctcgtgctttacggtatcgccgctcccgattcgcagcgcatcgccttctatcgccttcttgacgagttcttctgagcgggactctggggttcgaaatgaccgaccaagcgacgcccaacctgccatcacgagatttcgattccaccgccgccttctatgaaaggttgggcttcggaatcgttttccgggacgccggctggatgatcctccagcgcggggatctcatgctggagttcttcgcccaccccaacttgtttattgcagcttataatggttacaaataaagcaatagcatcacaaatttcacaaataaagcatttttttcactgcattctagttgtggtttgtccaaactcatcaatgtatcttatcatgtctgtataccgtcgacctctagctagagcttggcgtaatcatggtcatagctgtttcctgtgtgaaattgttatccgctcacaattccacacaacatacgagccggaagcataaagtgtaaagcctggggtgcctaatgagtgagctaactcacattaattgcgttgcgctcactgcccgctttccagtcgggaaacctgtcgtgccagctgcattaatgaatcggccaacgcgcggggagaggcggtttgcgtattgggcgctcttccgcttcctcgctcactgactcgctgcgctcggtcgttcggctgcggcgagcggtatcagctcactcaaaggcggtaatacggttatccacagaatcaggggataacgcaggaaagaacatgtgagcaaaaggccagcaaaaggccaggaaccgtaaaaaggccgcgttgctggcgtttttccataggctccgcccccctgacgagcatcacaaaaatcgacgctcaagtcagaggtggcgaaacccgacaggactataaagataccaggcgtttccccctggaagctccctcgtgcgctctcctgttccgaccctgccgcttaccggatacctgtccgcctttctcccttcgggaagcgtggcgctttctcatagctcacgctgtaggtatctcagttcggtgtaggtcgttcgctccaagctgggctgtgtgcacgaaccccccgttcagcccgaccgctgcgccttatccggtaactatcgtcttgagtccaacccggtaagacacgacttatcgccactggcagcagccactggtaacaggattagcagagcgaggtatgtaggcggtgctacagagttcttgaagtggtggcctaactacggctacactagaagaacagtatttggtatctgcgctctgctgaagccagttaccttcggaaaaagagttggtagctcttgatccggcaaacaaaccaccgctggtagcggtttttttgtttgcaagcagcagattacgcgcagaaaaaaaggatctcaagaagatcctttgatcttttctacggggtctgacgctcagtggaacgaaaactcacgttaagggattttggtcatgagattatcaaaaaggatcttcacctagatccttttaaattaaaaatgaagttttaaatcaatctaaagtatatatgagtaaacttggtctgacagttaccaatgcttaatcagtgaggcacctatctcagcgatctgtctatttcgttcatccatagttgcctgactccccgtcgtgtagataactacgatacgggagggcttaccatctggccccagtgctgcaatgataccgcgagacccacgctcaccggctccagatttatcagcaataaaccagccagccggaagggccgagcgcagaagtggtcctgcaactttatccgcctccatccagtctattaattgttgccgggaagctagagtaagtagttcgccagttaatagtttgcgcaacgttgttgccattgctacaggcatcgtggtgtcacgctcgtcgtttggtatggcttcattcagctccggttcccaacgatcaaggcgagttacatgatcccccatgttgtgcaaaaaagcggttagctccttcggtcctccgatcgttgtcagaagtaagttggccgcagtgttatcactcatggttatggcagcactgcataattctcttactgtcatgccatccgtaagatgcttttctgtgactggtgagtactcaaccaagtcattctgagaatagtgtatgcggcgaccgagttgctcttgcccggcgtcaatacgggataataccgcgccacatagcagaactttaaaagtgctcatcattggaaaacgttcttcggggcgaaaactctcaaggatcttaccgctgttgagatccagttcgatgtaacccactcgtgcacccaactgatcttcagcatcttttactttcaccagcgtttctgggtgagcaaaaacaggaaggcaaaatgccgcaaaaaagggaataagggcgacacggaaatgttgaatactcatactcttcctttttcaatattattgaagcatttatcagggttattgtctcatgagcggatacatatttgaatgtatttagaaaaataaacaaataggggttccgcgcacatttccccgaaaagtgccacctgacgtc

SEQ ID NO: 311 - DNA, 8220 bp, Artificial Sequence
  pDP-h7
  sig_peptide (1109)...(1174): light chain signal sequence
  V_region (1175)...(1495): light chain variable domain
  C_region (1496)...(1816): light chain constant domain
  RBS (1859)...(2433): IRES
  sig_peptide (2447)...(2503): heavy chain signal sequence
  V_region (2504)...(2860): heavy chain variable domain
  C_region (2861)...(3850): heavy chain constant domain
  misc_feature (3851)...(3874): Flag tag
tcaatattggccattagccatattattcattggttatatagcataaatcaatattggctattggccattgcatacgttgtatctatatcataatatgtacatttatattggctcatgtccaatatgaccgccatgttggcattgattattgactagttattaatagtaatcaattacggggtcattagttcatagcccatatatggagttccgcgttacataacttacggtaaatggcccgcctggctgaccgcccaacgacccccgcccattgacgtcaataatgacgtatgttcccatagtaacgccaatagggactttccattgacgtcaatgggtggagtatttacggtaaactgcccacttggcagtacatcaagtgtatcatatgccaagtccgccccctattgacgtcaatgacggtaaatggcccgcctggcattatgcccagtacatgaccttacgggactttcctacttggcagtacatctacgtattagtcatcgctattaccatggtgatgcggttttggcagtacaccaattggcgtggatagcggtttgactcacggggatttccaagtctccaccccattgacgtcaatgggagtttgttttggcaccaaaatcaacgggactttccaaaatgtcgtaacaactgcgatcgcccgccccgttgacgcaaatgggcggtaggcgtgtacggtgggaggtctatataagcagagctcgtttagtgaaccgtcagatcactagaagctttattgcggtagtttatcacagttaaattgctaacgcagtcagtgcttctgacacaacagtctcgaacttaagctgcagtgactctcttaaggtagccttgcagaagttggtcgtgaggcactgggcaggtaagtatcaaggttacaagacaggtttaaggtgaccaatagaaactgggcttgtcgagacagagaagactcttgcgtttctgataggcacctattggtcttactgacatccactttgcctttctctccacaggtgtccactcccagttcaattacagctcttaaggctagagtacttaatacgactcactataggctagtctcgtcgacgagactagcatggacatgagggtccccgctcagctcctggggctcctgctgctctggctcccaggtgccaagtgtgccatccagttgacccagtctccatcctccctgtctgcatctgtaggagacagagtcaccatcacttgcagggccagtcagagtattggcacaaacatacactggtacctgcagaagccagggcagtctccacagctcctgatctattatgcttctgagtctatctctgggatcccagacaggttcagtggcagtgggtctgggacagacttcactctcaccatcagcagactggagcctgaagattttgcagtgtattactgtcaacaaaataataactggccaaccacgttcggccaagggaccaaggtggaaatcaaacgtacggtggctgcaccatctgtcttcatcttcccgccatctgatgagcagttgaaatctggaactgcctctgttgtgtgcctgctgaataacttctatcccagagaggccaaagtacagtggaaggtggataacgccctccaatcgggtaactcccaggagagtgtcacagagcaggacagcaaggacagcacctacagcctcagcagcaccctgacgctgagcaaagcagactacgagaaacacaaagtctacgcctgcgaagtcacccatcagggcctgagctcgcccgtcacaaagagcttcaacaggggagagtgttgactcgaggcgcgccgagcatgcatctagggcggccaattccgcccctctccccccccccccctaacgttactggccgaagccgcttggaataaggccggtgtgcgtttgtctatatgttattttccaccatattgccgtcttttggcaatgtgagggcccggaaacctggccctgtcttcttgacgagcattcctaggggtctttcccctctcgccaaaggaatgcaaggtctgttgaatgtcgtgaaggaagcagttcctctggaagcttcttgaagacaaacaacgtctgtagcgaccctttgcaggcagcggaaccccccacctggcgacaggtgcctctgcggccaaaagccacgtgtataagatacacctgcaaaggcggcacaaccccagtgccacgttgtgagttggatagttgtggaaagagtcaaatggctctcctcaagcgtattcaacaaggggctgaaggatgcccagaaggtaccccattgtatgggatctgatctggggcctcggtgcacatgctttacatgtgtttagtcgaggttaaaaaaacgtctaggccccccgaaccacggggacgtggttttcctttgaaaaacacgatgataatatggccacaaccatggagtttgggctgagctggctttttcttgtggctattttaaaaggtgtccagtgtgaggtccagctggtacagtctggggctgaggtgaagaagcctggggctacagtgaaaatctcctgcaaggtttctggtttctcattaactaactatggtgtacactgggtgcgacaggccactggacaagggcttgagtggatgggtgtgatatggagtggtggaaacacagactataatacacctttcacatccagattcaccatctccagagatgattcaaagaacacggcgtatctgcaaatgaacagcctgaaaaccgaggacacggccgtgtattactgtgccagagccctcacctactatgatgatgagtttgcttactggggccctggaacgctggtcaccgtcagctcagcctccaccaagggcccatcggtcttccccctggcaccctcctccaagagcacctctgggggcacagcggccctgggctgcctggtcaaggactacttccccgaaccggtgacggtgtcgtggaactcaggcgccctgaccagcggcgtgcacaccttcccggctgtcctacagtcctcaggactctactccctcagcagcgtggtgaccgtgccctccagcagcttgggcacccagacctacatctgcaacgtgaatcacaagcccagcaacaccaaggtggacaagaaagttgagcccaaatcttgtgacaaaactcacacatgcccaccgtgcccagcacctgaactcctggggggaccgtcagtcttcctcttccccccaaaacccaaggacaccctcatgatctcccggacccctgaggtcacatgcgtggtggtggacgtgagccacgaagaccctgaggtcaagttcaactggtacgtggacggcgtggaggtgcataatgccaagacaaagccgcgggaggagcagtacaacagcacgtaccgtgtggtcagcgtcctcaccgtcctgcaccaggactggctgaatggcaaggagtacaagtgcaaggtcagcaacaaagccctcccagcccccatcgagaaaaccatctccaaagccaaagggcagccccgagaaccacaggtgtacaccctgcccccatcccgggatgagctgaccaagaaccaggtcagcctgacctgcctggtcaaaggcttctatcccagcgacatcgccgtggagtgggagagcaatgggcagccggagaacaactacaagaccacgcctcccgtgctggactccgacggctccttcttcctctacagcaagctcaccgtggacaagagcaggtggcagcaggggaacgtcttctcatgctccgtgatgcatgaggctctgcacaaccactacacgcagaagagcctctccctgtctccgggtaaagattacaaggatgacgacgataagtgagcggccgcttccctttagtgagggttaatgcttcgagcagacatgataagatacattgatgagtttggacaaaccacaactagaatgcagtgaaaaaaatgctttatttgtgaaatttgtgatgctattgctttatttgtaaccattataagctgcaataaacaagttaacaacaacaattgcattcattttatgtttcaggttcagggggagatgtgggaggttttttaaagcaagtaaaacctctacaaatgtggtaaaatccgataaggatcgatccgggctggcgtaatagcgaagaggcccgcaccgatcgcccttcccaacagttgcgcagcctgaatggcgaatggacgcgccctgtagcggcgcattaagcgcggcgggtgtggtggttacgcgcagcgtgaccgctacacttgccagcgccctagcgcccgctcctttcgctttcttcccttcctttctcgccacgttcgccggctttccccgtcaagctctaaatcgggggctccctttagggttccgatttagtgctttacggcacctcgaccccaaaaaacttgattagggtgatggttcacgtagtgggccatcgccctgatagacggtttttcgccctttgacgttggagtccacgttctttaatagtggactcttgttccaaactggaacaacactcaaccctatctcggtctattcttttgatttataagggattttgccgatttcggcctattggttaaaaaatgagctgatttaacaaaaatttaacgcgaattttaacaaaatattaacgcttacaatttcctgatgcggtattttctccttacgcatctgtgcggtatttcacaccgcatacgcggatctgcgcagcaccatggcctgaaataacctctgaaagaggaacttggttaggtaccttctgaggcggaaagaaccagctgtggaatgtgtgtcagttagggtgtggaaagtccccaggctccccagcaggcagaagtatgcaaagcatgcatctcaattagtcagcaaccaggtgtggaaagtccccaggctccccagcaggcagaagtatgcaaagcatgcatctcaattagtcagcaaccatagtcccgcccctaactccgcccatcccgcccctaactccgcccagttccgcccattctccgccccatggctgactaattttttttatttatgcagaggccgaggccgcctcggcctctgagctattccagaagtagtgaggaggcttttttggaggcctaggcttttgcaaaaagcttgattcttctgacacaacagtctcgaacttaaggctagagccaccatgattgaacaagatggattgcacgcaggttctccggccgcttgggtggagaggctattcggctatgactgggcacaacagacaatcggctgctctgatgccgccgtgttccggctgtcagcgcaggggcgcccggttctttttgtcaagaccgacctgtccggtgccctgaatgaactgcaggacgaggcagcgcggctatcgtggctggccacgacgggcgttccttgcgcagctgtgctcgacgttgtcactgaagcgggaagggactggctgctattgggcgaagtgccggggcaggatctcctgtcatctcaccttgctcctgccgagaaagtatccatcatggctgatgcaatgcggcggctgcatacgcttgatccggctacctgcccattcgaccaccaagcgaaacatcgcatcgagcgagcacgtactcggatggaagccggtcttgtcgatcaggatgatctggacgaagagcatcaggggctcgcgccagccgaactgttcgccaggctcaaggcgcgcatgcccgacggcgaggatctcgtcgtgacccatggcgatgcctgcttgccgaatatcatggtggaaaatggccgcttttctggattcatcgactgtggccggctgggtgtggcggaccgctatcaggacatagcgttggctacccgtgatattgctgaagagcttggcggcgaatgggctgaccgcttcctcgtgctttacggtatcgccgctcccgattcgcagcgcatcgccttctatcgccttcttgacgagttcttctgagcgggactctggggttcgaaatgaccgaccaagcgacgcccaacctgccatcacgatggccgcaataaaatatctttattttcattacatctgtgtgttggttttttgtgtgaatcgatagcgataaggatccgcgtatggtgcactctcagtacaatctgctctgatgccgcatagttaagccagccccgacacccgccaacacccgctgacgcgccctgacgggcttgtctgctcccggcatccgcttacagacaagctgtgaccgtctccgggagctgcatgtgtcagaggttttcaccgtcatcaccgaaacgcgcgagacgaaagggcctcgtgatacgcctatttttataggttaatgtcatgataataatggtttcttagacgtcaggtggcacttttcggggaaatgtgcgcggaacccctatttgtttatttttctaaatacattcaaatatgtatccgctcatgagacaataaccctgataaatgcttcaataatattgaaaaaggaagagtatgagtattcaacatttccgtgtcgcccttattcccttttttgcggcattttgccttcctgtttttgctcacccagaaacgctggtgaaagtaaaagatgctgaagatcagttgggtgcacgagtgggttacatcgaactggatctcaacagcggtaagatccttgagagttttcgccccgaagaacgttttccaatgatgagcacttttaaagttctgctatgtggcgcggtattatcccgtattgacgccgggcaagagcaactcggtcgccgcatacactattctcagaatgacttggttgagtactcaccagtcacagaaaagcatcttacggatggcatgacagtaagagaattatgcagtgctgccataaccatgagtgataacactgcggccaacttacttctgacaacgatcggaggaccgaaggagctaaccgcttttttgcacaacatgggggatcatgtaactcgccttgatcgttgggaaccggagctgaatgaagccataccaaacgacgagcgtgacaccacgatgcctgtagcaatggcaacaacgttgcgcaaactattaactggcgaactacttactctagcttcccggcaacaattaatagactggatggaggcggataaagttgcaggaccacttctgcgctcggcccttccggctggctggtttattgctgataaatctggagccggtgagcgtgggtctcgcggtatcattgcagcactggggccagatggtaagccctcccgtatcgtagttatctacacgacggggagtcaggcaactatggatgaacgaaatagacagatcgctgagataggtgcctcactgattaagcattggtaactgtcagaccaagtttactcatatatactttagattgatttaaaacttcatttttaatttaaaaggatctaggtgaagatcctttttgataatctcatgaccaaaatcccttaacgtgagttttcgttccactgagcgtcagaccccgtagaaaagatcaaaggatcttcttgagatcctttttttctgcgcgtaatctgctgcttgcaaacaaaaaaaccaccgctaccagcggtggtttgtttgccggatcaagagctaccaactctttttccgaaggtaactggcttcagcagagcgcagataccaaatactgttcttctagtgtagccgtagttaggccaccacttcaagaactctgtagcaccgcctacatacctcgctctgctaatcctgttaccagtggctgctgccagtggcgataagtcgtgtcttaccgggttggactcaagacgatagttaccggataaggcgcagcggtcgggctgaacggggggttcgtgcacacagcccagcttggagcgaacgacctacaccgaactgagatacctacagcgtgagctatgagaaagcgccacgcttcccgaagggagaaaggcggacaggtatccggtaagcggcagggtcggaacaggagagcgcacgagggagcttccagggggaaacgcctggtatctttatagtcctgtcgggtttcgccacctctgacttgagcgtcgatttttgtgatgctcgtcaggggggcggagcctatggaaaaacgccagcaacgcggcctttttacggttcctggccttttgctggccttttgctcacatggctcgacagatct

SEQ ID NO: 312 - DNA, 8220 bp, Artificial Sequence
  pD-h7
  sig_peptide (1109)...(1174): light chain signal sequence
  V_region (1175)...(1495): light chain variable domain
  C_region (1496)...(1816): light chain constant domain
  RBS (1859)...(2433): IRES
  sig_peptide (2447)...(2503): heavy chain signal sequence
  V_region (2504)...(2860): heavy chain variable domain
  C_region (2861)...(3850): heavy chain constant domain
  misc_feature (3851)...(3874): Flag tag
tcaatattggccattagccatattattcattggttatatagcataaatcaatattggctattggccattgcatacgttgtatctatatcataatatgtacatttatattggctcatgtccaatatgaccgccatgttggcattgattattgactagttattaatagtaatcaattacggggtcattagttcatagcccatatatggagttccgcgttacataacttacggtaaatggcccgcctggctgaccgcccaacgacccccgcccattgacgtcaataatgacgtatgttcccatagtaacgccaatagggactttccattgacgtcaatgggtggagtatttacggtaaactgcccacttggcagtacatcaagtgtatcatatgccaagtccgccccctattgacgtcaatgacggtaaatggcccgcctggcattatgcccagtacatgaccttacgggactttcctacttggcagtacatctacgtattagtcatcgctattaccatggtgatgcggttttggcagtacaccaattggcgtggatagcggtttgactcacggggatttccaagtctccaccccattgacgtcaatgggagtttgttttggcaccaaaatcaacgggactttccaaaatgtcgtaacaactgcgatcgcccgccccgttgacgcaaatgggcggtaggcgtgtacggtgggaggtctatataagcagagctcgtttagtgaaccgtcagatcactagaagctttattgcggtagtttatcacagttaaattgctaacgcagtcagtgcttctgacacaacagtctcgaacttaagctgcagtgactctcttaaggtagccttgcagaagttggtcgtgaggcactgggcaggtaagtatcaaggttacaagacaggtttaaggtgaccaatagaaactgggcttgtcgagacagagaagactcttgcgtttctgataggcacctattggtcttactgacatccactttgcctttctctccacaggtgtccactcccagttcaattacagctcttaaggctagagtacttaatacgactcactataggctagtctcgtcgacgagactagcatggacatgagggtccccgctcagctcctggggctcctgctgctctggctcccaggtgccaagtgtgccatccagttgacccagtctccatcctccctgtctgcatctgtaggagacagagtcaccatcacttgcagggccagtcagagtattggcacaaacatacactggtacctgcagaagccagggcagtctccacagctcctgatctattatgcttctgagtctatctctgggatcccagacaggttcagtggcagtgggtctgggacagacttcactctcaccatcagcagactggagcctgaagattttgcagtgtattactgtcaacaaaataataactggccaaccacgttcggccaagggaccaaggtggaaatcaaacgtacggtggctgcaccatctgtcttcatcttcccgccatctgatgagcagttgaaatctggaactgcctctgttgtgtgcctgctgaataacttctatcccagagaggccaaagtacagtggaaggtggataacgccctccaatcgggtaactcccaggagagtgtcacagagcaggacagcaaggacagcacctacagcctcagcagcaccctgacgctgagcaaagcagactacgagaaacacaaagtctacgcctgcgaagtcacccatcagggcctgagctcgcccgtcacaaagagcttcaacaggggagagtgttgactcgaggcgcgccgagcatgcatctagggcggccaattccgcccctctccccccccccccctaacgttactggccgaagccgcttggaataaggccggtgtgcgtttgtctatatgttattttccaccatattgccgtcttttggcaatgtgagggcccggaaacctggccctgtcttcttgacgagcattcctaggggtctttcccctctcgccaaaggaatgcaaggtctgttgaatgtcgtgaaggaagcagttcctctggaagcttcttgaagacaaacaacgtctgtagcgaccctttgcaggcagcggaaccccccacctggcgacaggtgcctctgcggccaaaagccacgtgtataagatacacctgcaaaggcggcacaaccccagtgccacgttgtgagttggatagttgtggaaagagtcaaatggctctcctcaagcgtattcaacaaggggctgaaggatgcccagaaggtaccccattgtatgggatctgatctggggcctcggtgcacatgctttacatgtgtttagtcgaggttaaaaaaacgtctaggccccccgaaccacggggacgtggttttcctttgaaaaacacgatgataatatggccacaaccatggagtttgggctgagctggctttttcttgtggctattttaaaaggtgtccagtgtgaggtccagctggtacagtctggggctgaggtgaagaagcctggggctacagtgaaaatctcctgcaaggtttctggtttctcattaactaactatggtgtacactgggtgcgacaggccactggacaagggcttgagtggatgggtgtgatatggagtggtggaaacacagactataatacacctttcacatccagattcaccatctccagagatgattcaaagaacacggcgtatctgcaaatgaacagcctgaaaaccgaggacacggccgtgtattactgtgccagagccctcacctactatgatgatgagtttgcttactggggccagggaacgctggtcaccgtcagctcagcctccaccaagggcccatcggtcttccccctggcaccctcctccaagagcacctctgggggcacagcggccctgggctgcctggtcaaggactacttccccgaaccggtgacggtgtcgtggaactcaggcgccctgaccagcggcgtgcacaccttcccggctgtcctacagtcctcaggactctactccctcagcagcgtggtgaccgtgccctccagcagcttgggcacccagacctacatctgcaacgtgaatcacaagcccagcaacaccaaggtggacaagaaagttgagcccaaatcttgtgacaaaactcacacatgcccaccgtgcccagcacctgaactcctggggggaccgtcagtcttcctcttccccccaaaacccaaggacaccctcatgatctcccggacccctgaggtcacatgcgtggtggtggacgtgagccacgaagaccctgaggtcaagttcaactggtacgtggacggcgtggaggtgcataatgccaagacaaagccgcgggaggagcagtacaacagcacgtaccgtgtggtcagcgtcctcaccgtcctgcaccaggactggctgaatggcaaggagtacaagtgcaaggtcagcaacaaagccctcccagcccccatcgagaaaaccatctccaaagccaaagggcagccccgagaaccacaggtgtacaccctgcccccatcccgggatgagctgaccaagaaccaggtcagcctgacctgcctggtcaaaggcttctatcccagcgacatcgccgtggagtgggagagcaatgggcagccggagaacaactacaagaccacgcctcccgtgctggactccgacggctccttcttcctctacagcaagctcaccgtggacaagagcaggtggcagcaggggaacgtcttctcatgctccgtgatgcatgaggctctgcacaaccactacacgcagaagagcctctccctgtctccgggtaaagattacaaggatgacgacgataagtgagcggccgcttccctttagtgagggttaatgcttcgagcagacatgataagatacattgatgagtttggacaaaccacaactagaatgcagtgaaaaaaatgctttatttgtgaaatttgtgatgctattgctttatttgtaaccattataagctgcaataaacaagttaacaacaacaattgcattcattttatgtttcaggttcagggggagatgtgggaggttttttaaagcaagtaaaacctctacaaatgtggtaaaatccgataaggatcgatccgggctggcgtaatagcgaagaggcccgcaccgatcgcccttcccaacagttgcgcagcctgaatggcgaatggacgcgccctgtagcggcgcattaagcgcggcgggtgtggtggttacgcgcagcgtgaccgctacacttgccagcgccctagcgcccgctcctttcgctttcttcccttcctttctcgccacgttcgccggctttccccgtcaagctctaaatcgggggctccctttagggttccgatttagtgctttacggcacctcgaccccaaaaaacttgattagggtgatggttcacgtagtgggccatcgccctgatagacggtttttcgccctttgacgttggagtccacgttctttaatagtggactcttgttccaaactggaacaacactcaaccctatctcggtctattcttttgatttataagggattttgccgatttcggcctattggttaaaaaatgagctgatttaacaaaaatttaacgcgaattttaacaaaatattaacgcttacaatttcctgatgcggtattttctccttacgcatctgtgcggtatttcacaccgcatacgcggatctgcgcagcaccatggcctgaaataacctctgaaagaggaacttggttaggtaccttctgaggcggaaagaaccagctgtggaatgtgtgtcagttagggtgtggaaagtccccaggctccccagcaggcagaagtatgcaaagcatgcatctcaattagtcagcaaccaggtgtggaaagtccccaggctccccagcaggcagaagtatgcaaagcatgcatctcaattagtcagcaaccatagtcccgcccctaactccgcccatcccgcccctaactccgcccagttccgcccattctccgccccatggctgactaattttttttatttatgcagaggccgaggccgcctcggcctctgagctattccagaagtagtgaggaggcttttttggaggcctaggcttttgcaaaaagcttgattcttctgacacaacagtctcgaacttaaggctagagccaccatgattgaacaagatggattgcacgcaggttctccggccgcttgggtggagaggctattcggctatgactgggcacaacagacaatcggctgctctgatgccgccgtgttccggctgtcagcgcaggggcgcccggttctttttgtcaagaccgacctgtccggtgccctgaatgaactgcaggacgaggcagcgcggctatcgtggctggccacgacgggcgttccttgcgcagctgtgctcgacgttgtcactgaagcgggaagggactggctgctattgggcgaagtgccggggcaggatctcctgtcatctcaccttgctcctgccgagaaagtatccatcatggctgatgcaatgcggcggctgcatacgcttgatccggctacctgcccattcgaccaccaagcgaaacatcgcatcgagcgagcacgtactcggatggaagccggtcttgtcgatcaggatgatctggacgaagagcatcaggggctcgcgccagccgaactgttcgccaggctcaaggcgcgcatgcccgacggcgaggatctcgtcgtgacccatggcgatgcctgcttgccgaatatcatggtggaaaatggccgcttttctggattcatcgactgtggccggctgggtgtggcggaccgctatcaggacatagcgttggctacccgtgatattgctgaagagcttggcggcgaatgggctgaccgcttcctcgtgctttacggtatcgccgctcccgattcgcagcgcatcgccttctatcgccttcttgacgagttcttctgagcgggactctggggttcgaaatgaccgaccaagcgacgcccaacctgccatcacgatggccgcaataaaatatctttattttcattacatctgtgtgttggttttttgtgtgaatcgatagcgataaggatccgcgtatggtgcactctcagtacaatctgctctgatgccgcatagttaagccagccccgacacccgccaacacccgctgacgcgccctgacgggcttgtctgctcccggcatccgcttacagacaagctgtgaccgtctccgggagctgcatgtgtcagaggttttcaccgtcatcaccgaaacgcgcgagacgaaagggcctcgtgatacgcctatttttataggttaatgtcatgataataatggtttcttagacgtcaggtggcacttttcggggaaatgtgcgcggaacccctatttgtttatttttctaaatacattcaaatatgtatccgctcatgagacaataaccctgataaatgcttcaataatattgaaaaaggaagagtatgagtattcaacatttccgtgtcgcccttattcccttttttgcggcattttgccttcctgtttttgctcacccagaaacgctggtgaaagtaaaagatgctgaagatcagttgggtgcacgagtgggttacatcgaactggatctcaacagcggtaagatccttgagagttttcgccccgaagaacgttttccaatgatgagcacttttaaagttctgctatgtggcgcggtattatcccgtattgacgccgggcaagagcaactcggtcgccgcatacactattctcagaatgacttggttgagtactcaccagtcacagaaaagcatcttacggatggcatgacagtaagagaattatgcagtgctgccataaccatgagtgataacactgcggccaacttacttctgacaacgatcggaggaccgaaggagctaaccgcttttttgcacaacatgggggatcatgtaactcgccttgatcgttgggaaccggagctgaatgaagccataccaaacgacgagcgtgacaccacgatgcctgtagcaatggcaacaacgttgcgcaaactattaactggcgaactacttactctagcttcccggcaacaattaatagactggatggaggcggataaagttgcaggaccacttctgcgctcggcccttccggctggctggtttattgctgataaatctggagccggtgagcgtgggtctcgcggtatcattgcagcactggggccagatggtaagccctcccgtatcgtagttatctacacgacggggagtcaggcaactatggatgaacgaaatagacagatcgctgagataggtgcctcactgattaagcattggtaactgtcagaccaagtttactcatatatactttagattgatttaaaacttcatttttaatttaaaaggatctaggtgaagatcctttttgataatctcatgaccaaaatcccttaacgtgagttttcgttccactgagcgtcagaccccgtagaaaagatcaaaggatcttcttgagatcctttttttctgcgcgtaatctgctgcttgcaaacaaaaaaaccaccgctaccagcggtggtttgtttgccggatcaagagctaccaactctttttccgaaggtaactggcttcagcagagcgcagataccaaatactgttcttctagtgtagccgtagttaggccaccacttcaagaactctgtagcaccgcctacatacctcgctctgctaatcctgttaccagtggctgctgccagtggcgataagtcgtgtcttaccgggttggactcaagacgatagttaccggataaggcgcagcggtcgggctgaacggggggttcgtgcacacagcccagcttggagcgaacgacctacaccgaactgagatacctacagcgtgagctatgagaaagcgccacgcttcccgaagggagaaaggcggacaggtatccggtaagcggcagggtcggaacaggagagcgcacgagggagcttccagggggaaacgcctggtatctttatagtcctgtcgggtttcgccacctctgacttgagcgtcgatttttgtgatgctcgtcaggggggcggagcctatggaaaaacgccagcaacgcggcctttttacggttcctggccttttgctggccttttgctcacatggctcgacagatct

SEQ ID NO: 313 - DNA, 8220 bp, Artificial Sequence
  pE-h7
  sig_peptide (1109)...(1174): light chain signal sequence
  V_region (1175)...(1495): light chain variable domain
  C_region (1496)...(1816): light chain constant domain
  RBS (1859)...(2433): IRES
  sig_peptide (2447)...(2503): heavy chain signal sequence
  V_region (2504)...(2860): heavy chain variable domain
  C_region (2861)...(3850): heavy chain constant domain
  misc_feature (3851)...(3874): Flag tag
tcaatattggccattagccatattattcattggttatatagcataaatcaatattggctattggccattgcatacgttgtatctatatcataatatgtacatttatattggctcatgtccaatatgaccgccatgttggcattgattattgactagttattaatagtaatcaattacggggtcattagttcatagcccatatatggagttccgcgttacataacttacggtaaatggcccgcctggctgaccgcccaacgacccccgcccattgacgtcaataatgacgtatgttcccatagtaacgccaatagggactttccattgacgtcaatgggtggagtatttacggtaaactgcccacttggcagtacatcaagtgtatcatatgccaagtccgccccctattgacgtcaatgacggtaaatggcccgcctggcattatgcccagtacatgaccttacgggactttcctacttggcagtacatctacgtattagtcatcgctattaccatggtgatgcggttttggcagtacaccaattggcgtggatagcggtttgactcacggggatttccaagtctccaccccattgacgtcaatgggagtttgttttggcaccaaaatcaacgggactttccaaaatgtcgtaacaactgcgatcgcccgccccgttgacgcaaatgggcggtaggcgtgtacggtgggaggtctatataagcagagctcgtttagtgaaccgtcagatcactagaagctttattgcggtagtttatcacagttaaattgctaacgcagtcagtgcttctgacacaacagtctcgaacttaagctgcagtgactctcttaaggtagccttgcagaagttggtcgtgaggcactgggcaggtaagtatcaaggttacaagacaggtttaaggtgaccaatagaaactgggcttgtcgagacagagaagactcttgcgtttctgataggcacctattggtcttactgacatccactttgcctttctctccacaggtgtccactcccagttcaattacagctcttaaggctagagtacttaatacgactcactataggctagtctcgtcgacgagactagcatggacatgagggtccccgctcagctcctggggctcctgctgctctggctcccaggtgccaagtgtgccatccagttgacccagtctccatcctccctgtctgcatctgtaggagacagagtcaccatcacttgcagggccagtcagagtattggcacaaacatacactggtacctgcagaagccagggcagtctccacagctcctgatctattatgcttctgagtctatctctgggatcccagacaggttcagtggcagtgggtctgggacagacttcactctcaccatcagcagactggagcctgaagattttgcagtgtattactgtcaacaaaataataactggccaaccacgttcggccaagggaccaaggtggaaatcaaacgtacggtggctgcaccatctgtcttcatcttcccgccatctgatgagcagttgaaatctggaactgcctctgttgtgtgcctgctgaataacttctatcccagagaggccaaagtacagtggaaggtggataacgccctccaatcgggtaactcccaggagagtgtcacagagcaggacagcaaggacagcacctacagcctcagcagcaccctgacgctgagcaaagcagactacgagaaacacaaagtctacgcctgcgaagtcacccatcagggcctgagctcgcccgtcacaaagagcttcaacaggggagagtgttgactcgaggcgcgccgagcatgcatctagggcggccaattccgcccctctccccccccccccctaacgttactggccgaagccgcttggaataaggccggtgtgcgtttgtctatatgttattttccaccatattgccgtcttttggcaatgtgagggcccggaaacctggccctgtcttcttgacgagcattcctaggggtctttcccctctcgccaaaggaatgcaaggtctgttgaatgtcgtgaaggaagcagttcctctggaagcttcttgaagacaaacaacgtctgtagcgaccctttgcaggcagcggaaccccccacctggcgacaggtgcctctgcggccaaaagccacgtgtataagatacacctgcaaaggcggcacaaccccagtgccacgttgtgagttggatagttgtggaaagagtcaaatggctctcctcaagcgtattcaacaaggggctgaaggatgcccagaaggtaccccattgtatgggatctgatctggggcctcggtgcacatgctttacatgtgtttagtcgaggttaaaaaaacgtctaggccccccgaaccacggggacgtggttttcctttgaaaaacacgatgataatatggccacaaccatggagtttgggctgagctggctttttcttgtggctattttaaaaggtgtccagtgtgaggtccagctggtacagtctggggctgaggtgaagaagcctggggctacagtgaaaatctcctgcaaggtttctggtttctcattaactaactatggtgtacactgggtgcgacaggccactggacaagggcttgagtggatgggtgtgatatggagtggtggaaacacagactataatacacctttcacatccagattcaccatctccagagatgattcaaagaacacggcgtatctgcaaatgaacagcctgaaaaccgaggacacggccgtgtattactgtgccagagccctcacctactatgatgaggagtttgcttactggggccagggaacgctggtcaccgtcagctcagcctccaccaagggcccatcggtcttccccctggcaccctcctccaagagcacctctgggggcacagcggccctgggctgcctggtcaaggactacttccccgaaccggtgacggtgtcgtggaactcaggcgccctgaccagcggcgtgcacaccttcccggctgtcctacagtcctcaggactctactccctcagcagcgtggtgaccgtgccctccagcagcttgggcacccagacctacatctgcaacgtgaatcacaagcccagcaacaccaaggtggacaagaaagttgagcccaaatcttgtgacaaaactcacacatgcccaccgtgcccagcacctgaactcctggggggaccgtcagtcttcctcttccccccaaaacccaaggacaccctcatgatctcccggacccctgaggtcacatgcgtggtggtggacgtgagccacgaagaccctgaggtcaagttcaactggtacgtggacggcgtggaggtgcataatgccaagacaaagccgcgggaggagcagtacaacagcacgtaccgtgtggtcagcgtcctcaccgtcctgcaccaggactggctgaatggcaaggagtacaagtgcaaggtcagcaacaaagccctcccagcccccatcgagaaaaccatctccaaagccaaagggcagccccgagaaccacaggtgtacaccctgcccccatcccgggatgagctgaccaagaaccaggtcagcctgacctgcctggtcaaaggcttctatcccagcgacatcgccgtggagtgggagagcaatgggcagccggagaacaactacaagaccacgcctcccgtgctggactccgacggctccttcttcctctacagcaagctcaccgtggacaagagcaggtggcagcaggggaacgtcttctcatgctccgtgatgcatgaggctctgcacaaccactacacgcagaagagcctctccctgtctccgggtaaagattacaaggatgacgacgataagtgagcggccgcttccctttagtgagggttaatgcttcgagcagacatgataagatacattgatgagtttggacaaaccacaactagaatgcagtgaaaaaaatgctttatttgtgaaatttgtgatgctattgctttatttgtaaccattataagctgcaataaacaagttaacaacaacaattgcattcattttatgtttcaggttcagggggagatgtgggaggttttttaaagcaagtaaaacctctacaaatgtggtaaaatccgataaggatcgatccgggctggcgtaatagcgaagaggcccgcaccgatcgcccttcccaacagttgcgcagcctgaatggcgaatggacgcgccctgtagcggcgcattaagcgcggcgggtgtggtggttacgcgcagcgtgaccgctacacttgccagcgccctagcgcccgctcctttcgctttcttcccttcctttctcgccacgttcgccggctttccccgtcaagctctaaatcgggggctccctttagggttccgatttagtgctttacggcacctcgaccccaaaaaacttgattagggtgatggttcacgtagtgggccatcgccctgatagacggtttttcgccctttgacgttggagtccacgttctttaatagtggactcttgttccaaactggaacaacactcaaccctatctcggtctattcttttgatttataagggattttgccgatttcggcctattggttaaaaaatgagctgatttaacaaaaatttaacgcgaattttaacaaaatattaacgcttacaatttcctgatgcggtattttctccttacgcatctgtgcggtatttcacaccgcatacgcggatctgcgcagcaccatggcctgaaataacctctgaaagaggaacttggttaggtaccttctgaggcggaaagaaccagctgtggaatgtgtgtcagttagggtgtggaaagtccccaggctccccagcaggcagaagtatgcaaagcatgcatctcaattagtcagcaaccaggtgtggaaagtccccaggctccccagcaggcagaagtatgcaaagcatgcatctcaattagtcagcaaccatagtcccgcccctaactccgcccatcccgcccctaactccgcccagttccgcccattctccgccccatggctgactaattttttttatttatgcagaggccgaggccgcctcggcctctgagctattccagaagtagtgaggaggcttttttggaggcctaggcttttgcaaaaagcttgattcttctgacacaacagtctcgaacttaaggctagagccaccatgattgaacaagatggattgcacgcaggttctccggccgcttgggtggagaggctattcggctatgactgggcacaacagacaatcggctgctctgatgccgccgtgttccggctgtcagcgcaggggcgcccggttctttttgtcaagaccgacctgtccggtgccctgaatgaactgcaggacgaggcagcgcggctatcgtggctggccacgacgggcgttccttgcgcagctgtgctcgacgttgtcactgaagcgggaagggactggctgctattgggcgaagtgccggggcaggatctcctgtcatctcaccttgctcctgccgagaaagtatccatcatggctgatgcaatgcggcggctgcatacgcttgatccggctacctgcccattcgaccaccaagcgaaacatcgcatcgagcgagcacgtactcggatggaagccggtcttgtcgatcaggatgatctggacgaagagcatcaggggctcgcgccagccgaactgttcgccaggctcaaggcgcgcatgcccgacggcgaggatctcgtcgtgacccatggcgatgcctgcttgccgaatatcatggtggaaaatggccgcttttctggattcatcgactgtggccggctgggtgtggcggaccgctatcaggacatagcgttggctacccgtgatattgctgaagagcttggcggcgaatgggctgaccgcttcctcgtgctttacggtatcgccgctcccgattcgcagcgcatcgccttctatcgccttcttgacgagttcttctgagcgggactctggggttcgaaatgaccgaccaagcgacgcccaacctgccatcacgatggccgcaataaaatatctttattttcattacatctgtgtgttggttttttgtgtgaatcgatagcgataaggatccgcgtatggtgcactctcagtacaatctgctctgatgccgcatagttaagccagccccgacacccgccaacacccgctgacgcgccctgacgggcttgtctgctcccggcatccgcttacagacaagctgtgaccgtctccgggagctgcatgtgtcagaggttttcaccgtcatcaccgaaacgcgcgagacgaaagggcctcgtgatacgcctatttttataggttaatgtcatgataataatggtttcttagacgtcaggtggcacttttcggggaaatgtgcgcggaacccctatttgtttatttttctaaatacattcaaatatgtatccgctcatgagacaataaccctgataaatgcttcaataatattgaaaaaggaagagtatgagtattcaacatttccgtgtcgcccttattcccttttttgcggcattttgccttcctgtttttgctcacccagaaacgctggtgaaagtaaaagatgctgaagatcagttgggtgcacgagtgggttacatcgaactggatctcaacagcggtaagatccttgagagttttcgccccgaagaacgttttccaatgatgagcacttttaaagttctgctatgtggcgcggtattatcccgtattgacgccgggcaagagcaactcggtcgccgcatacactattctcagaatgacttggttgagtactcaccagtcacagaaaagcatcttacggatggcatgacagtaagagaattatgcagtgctgccataaccatgagtgataacactgcggccaacttacttctgacaacgatcggaggaccgaaggagctaaccgcttttttgcacaacatgggggatcatgtaactcgccttgatcgttgggaaccggagctgaatgaagccataccaaacgacgagcgtgacaccacgatgcctgtagcaatggcaacaacgttgcgcaaactattaactggcgaactacttactctagcttcccggcaacaattaatagactggatggaggcggataaagttgcaggaccacttctgcgctcggcccttccggctggctggtttattgctgataaatctggagccggtgagcgtgggtctcgcggtatcattgcagcactggggccagatggtaagccctcccgtatcgtagttatctacacgacggggagtcaggcaactatggatgaacgaaatagacagatcgctgagataggtgcctcactgattaagcattggtaactgtcagaccaagtttactcatatatactttagattgatttaaaacttcatttttaatttaaaaggatctaggtgaagatcctttttgataatctcatgaccaaaatcccttaacgtgagttttcgttccactgagcgtcagaccccgtagaaaagatcaaaggatcttcttgagatcctttttttctgcgcgtaatctgctgcttgcaaacaaaaaaaccaccgctaccagcggtggtttgtttgccggatcaagagctaccaactctttttccgaaggtaactggcttcagcagagcgcagataccaaatactgttcttctagtgtagccgtagttaggccaccacttcaagaactctgtagcaccgcctacatacctcgctctgctaatcctgttaccagtggctgctgccagtggcgataagtcgtgtcttaccgggttggactcaagacgatagttaccggataaggcgcagcggtcgggctgaacggggggttcgtgcacacagcccagcttggagcgaacgacctacaccgaactgagatacctacagcgtgagctatgagaaagcgccacgcttcccgaagggagaaaggcggacaggtatccggtaagcggcagggtcggaacaggagagcgcacgagggagcttccagggggaaacgcctggtatctttatagtcctgtcgggtttcgccacctctgacttgagcgtcgatttttgtgatgctcgtcaggggggcggagcctatggaaaaacgccagcaacgcggcctttttacggttcctggccttttgctggccttttgctcacatggctcgacagatct

SEQ ID NO: 314 - DNA, 8220 bp, Artificial Sequence
  pEP-h7
  sig_peptide (1109)...(1174): light chain signal sequence
  V_region (1175)...(1495): light chain variable domain
  C_region (1496)...(1816): light chain constant domain
  RBS (1859)...(2433): IRES
  sig_peptide (2447)...(2503): heavy chain signal sequence
  V_region (2504)...(2860): heavy chain variable domain
  C_region (2861)...(3850): heavy chain constant domain
  misc_feature (3851)...(3874): Flag tag
tcaatattggccattagccatattattcattggttatatagcataaatcaatattggctattggccattgcatacgttgtatctatatcataatatgtacatttatattggctcatgtccaatatgaccgccatgttggcattgattattgactagttattaatagtaatcaattacggggtcattagttcatagcccatatatggagttccgcgttacataacttacggtaaatggcccgcctggctgaccgcccaacgacccccgcccattgacgtcaataatgacgtatgttcccatagtaacgccaatagggactttccattgacgtcaatgggtggagtatttacggtaaactgcccacttggcagtacatcaagtgtatcatatgccaagtccgccccctattgacgtcaatgacggtaaatggcccgcctggcattatgcccagtacatgaccttacgggactttcctacttggcagtacatctacgtattagtcatcgctattaccatggtgatgcggttttggcagtacaccaattggcgtggatagcggtttgactcacggggatttccaagtctccaccccattgacgtcaatgggagtttgttttggcaccaaaatcaacgggactttccaaaatgtcgtaacaactgcgatcgcccgccccgttgacgcaaatgggcggtaggcgtgtacggtgggaggtctatataagcagagctcgtttagtgaaccgtcagatcactagaagctttattgcggtagtttatcacagttaaattgctaacgcagtcagtgcttctgacacaacagtctcgaacttaagctgcagtgactctcttaaggtagccttgcagaagttggtcgtgaggcactgggcaggtaagtatcaaggttacaagacaggtttaaggtgaccaatagaaactgggcttgtcgagacagagaagactcttgcgtttctgataggcacctattggtcttactgacatccactttgcctttctctccacaggtgtccactcccagttcaattacagctcttaaggctagagtacttaatacgactcactataggctagtctcgtcgacgagactagcatggacatgagggtccccgctcagctcctggggctcctgctgctctggctcccaggtgccaagtgtgccatccagttgacccagtctccatcctccctgtctgcatctgtaggagacagagtcaccatcacttgcagggccagtcagagtattggcacaaacatacactggtacctgcagaagccagggcagtctccacagctcctgatctattatgcttctgagtctatctctgggatcccagacaggttcagtggcagtgggtctgggacagacttcactctcaccatcagcagactggagcctgaagattttgcagtgtattactgtcaacaaaataataactggccaaccacgttcggccaagggaccaaggtggaaatcaaacgtacggtggctgcaccatctgtcttcatcttcccgccatctgatgagcagttgaaatctggaactgcctctgttgtgtgcctgctgaataacttctatcccagagaggccaaagtacagtggaaggtggataacgccctccaatcgggtaactcccaggagagtgtcacagagcaggacagcaaggacagcacctacagcctcagcagcaccctgacgctgagcaaagcagactacgagaaacacaaagtctacgcctgcgaagtcacccatcagggcctgagctcgcccgtcacaaagagcttcaacaggggagagtgttgactcgaggcgcgccgagcatgcatctagggcggccaattccgcccctctccccccccccccctaacgttactggccgaagccgcttggaataaggccggtgtgcgtttgtctatatgttattttccaccatattgccgtcttttggcaatgtgagggcccggaaacctggccctgtcttcttgacgagcattcctaggggtctttcccctctcgccaaaggaatgcaaggtctgttgaatgtcgtgaaggaagcagttcctctggaagcttcttgaagacaaacaacgtctgtagcgaccctttgcaggcagcggaaccccccacctggcgacaggtgcctctgcggccaaaagccacgtgtataagatacacctgcaaaggcggcacaaccccagtgccacgttgtgagttggatagttgtggaaagagtcaaatggctctcctcaagcgtattcaacaaggggctgaaggatgcccagaaggtaccccattgtatgggatctgatctggggcctcggtgcacatgctttacatgtgtttagtcgaggttaaaaaaacgtctaggccccccgaaccacggggacgtggttttcctttgaaaaacacgatgataatatggccacaaccatggagtttgggctgagctggctttttcttgtggctattttaaaaggtgtccagtgtgaggtccagctggtacagtctggggctgaggtgaagaagcctggggctacagtgaaaatctcctgcaaggtttctggtttctcattaactaactatggtgtacactgggtgcgacaggccactggacaagggcttgagtggatgggtgtgatatggagtggtggaaacacagactataatacacctttcacatccagattcaccatctccagagatgattcaaagaacacggcgtatctgcaaatgaacagcctgaaaaccgaggacacggccgtgtattactgtgccagagccctcacctactatgatgaggagtttgcttactggggccctggaacgctggtcaccgtcagctcagcctccaccaagggcccatcggtcttccccctggcaccctcctccaagagcacctctgggggcacagcggccctgggctgcctggtcaaggactacttccccgaaccggtgacggtgtcgtggaactcaggcgccctgaccagcggcgtgcacaccttcccggctgtcctacagtcctcaggactctactccctcagcagcgtggtgaccgtgccctccagcagcttgggcacccagacctacatctgcaacgtgaatcacaagcccagcaacaccaaggtggacaagaaagttgagcccaaatcttgtgacaaaactcacacatgcccaccgtgcccagcacctgaactcctggggggaccgtcagtcttcctcttccccccaaaacccaaggacaccctcatgatctcccggacccctgaggtcacatgcgtggtggtggacgtgagccacgaagaccctgaggtcaagttcaactggtacgtggacggcgtggaggtgcataatgccaagacaaagccgcgggaggagcagtacaacagcacgtaccgtgtggtcagcgtcctcaccgtcctgcaccaggactggctgaatggcaaggagtacaagtgcaaggtcagcaacaaagccctcccagcccccatcgagaaaaccatctccaaagccaaagggcagccccgagaaccacaggtgtacaccctgcccccatcccgggatgagctgaccaagaaccaggtcagcctgacctgcctggtcaaaggcttctatcccagcgacatcgccgtggagtgggagagcaatgggcagccggagaacaactacaagaccacgcctcccgtgctggactccgacggctccttcttcctctacagcaagctcaccgtggacaagagcaggtggcagcaggggaacgtcttctcatgctccgtgatgcatgaggctctgcacaaccactacacgcagaagagcctctccctgtctccgggtaaagattacaaggatgacgacgataagtgagcggccgcttccctttagtgagggttaatgcttcgagcagacatgataagatacattgatgagtttggacaaaccacaactagaatgcagtgaaaaaaatgctttatttgtgaaatttgtgatgctattgctttatttgtaaccattataagctgcaataaacaagttaacaacaacaattgcattcattttatgtttcaggttcagggggagatgtgggaggttttttaaagcaagtaaaacctctacaaatgtggtaaaatccgataaggatcgatccgggctggcgtaatagcgaagaggcccgcaccgatcgcccttcccaacagttgcgcagcctgaatggcgaatggacgcgccctgtagcggcgcattaagcgcggcgggtgtggtggttacgcgcagcgtgaccgctacacttgccagcgccctagcgcccgctcctttcgctttcttcccttcctttctcgccacgttcgccggctttccccgtcaagctctaaatcgggggctccctttagggttccgatttagtgctttacggcacctcgaccccaaaaaacttgattagggtgatggttcacgtagtgggccatcgccctgatagacggtttttcgccctttgacgttggagtccacgttctttaatagtggactcttgttccaaactggaacaacactcaaccctatctcggtctattcttttgatttataagggattttgccgatttcggcctattggttaaaaaatgagctgatttaacaaaaatttaacgcgaattttaacaaaatattaacgcttacaatttcctgatgcggtattttctccttacgcatctgtgcggtatttcacaccgcatacgcggatctgcgcagcaccatggcctgaaataacctctgaaagaggaacttggttaggtaccttctgaggcggaaagaaccagctgtggaatgtgtgtcagttagggtgtggaaagtccccaggctccccagcaggcagaagtatgcaaagcatgcatctcaattagtcagcaaccaggtgtggaaagtccccaggctccccagcaggcagaagtatgcaaagcatgcatctcaattagtcagcaaccatagtcccgcccctaactccgcccatcccgcccctaactccgcccagttccgcccattctccgccccatggctgactaattttttttatttatgcagaggccgaggccgcctcggcctctgagctattccagaagtagtgaggaggcttttttggaggcctaggcttttgcaaaaagcttgattcttctgacacaacagtctcgaacttaaggctagagccaccatgattgaacaagatggattgcacgcaggttctccggccgcttgggtggagaggctattcggctatgactgggcacaacagacaatcggctgctctgatgccgccgtgttccggctgtcagcgcaggggcgcccggttctttttgtcaagaccgacctgtccggtgccctgaatgaactgcaggacgaggcagcgcggctatcgtggctggccacgacgggcgttccttgcgcagctgtgctcgacgttgtcactgaagcgggaagggactggctgctattgggcgaagtgccggggcaggatctcctgtcatctcaccttgctcctgccgagaaagtatccatcatggctgatgcaatgcggcggctgcatacgcttgatccggctacctgcccattcgaccaccaagcgaaacatcgcatcgagcgagcacgtactcggatggaagccggtcttgtcgatcaggatgatctggacgaagagcatcaggggctcgcgccagccgaactgttcgccaggctcaaggcgcgcatgcccgacggcgaggatctcgtcgtgacccatggcgatgcctgcttgccgaatatcatggtggaaaatggccgcttttctggattcatcgactgtggccggctgggtgtggcggaccgctatcaggacatagcgttggctacccgtgatattgctgaagagcttggcggcgaatgggctgaccgcttcctcgtgctttacggtatcgccgctcccgattcgcagcgcatcgccttctatcgccttcttgacgagttcttctgagcgggactctggggttcgaaatgaccgaccaagcgacgcccaacctgccatcacgatggccgcaataaaatatctttattttcattacatctgtgtgttggttttttgtgtgaatcgatagcgataaggatccgcgtatggtgcactctcagtacaatctgctctgatgccgcatagttaagccagccccgacacccgccaacacccgctgacgcgccctgacgggcttgtctgctcccggcatccgcttacagacaagctgtgaccgtctccgggagctgcatgtgtcagaggttttcaccgtcatcaccgaaacgcgcgagacgaaagggcctcgtgatacgcctatttttataggttaatgtcatgataataatggtttcttagacgtcaggtggcacttttcggggaaatgtgcgcggaacccctatttgtttatttttctaaatacattcaaatatgtatccgctcatgagacaataaccctgataaatgcttcaataatattgaaaaaggaagagtatgagtattcaacatttccgtgtcgcccttattcccttttttgcggcattttgccttcctgtttttgctcacccagaaacgctggtgaaagtaaaagatgctgaagatcagttgggtgcacgagtgggttacatcgaactggatctcaacagcggtaagatccttgagagttttcgccccgaagaacgttttccaatgatgagcacttttaaagttctgctatgtggcgcggtattatcccgtattgacgccgggcaagagcaactcggtcgccgcatacactattctcagaatgacttggttgagtactcaccagtcacagaaaagcatcttacggatggcatgacagtaagagaattatgcagtgctgccataaccatgagtgataacactgcggccaacttacttctgacaacgatcggaggaccgaaggagctaaccgcttttttgcacaacatgggggatcatgtaactcgccttgatcgttgggaaccggagctgaatgaagccataccaaacgacgagcgtgacaccacgatgcctgtagcaatggcaacaacgttgcgcaaactattaactggcgaactacttactctagcttcccggcaacaattaatagactggatggaggcggataaagttgcaggaccacttctgcgctcggcccttccggctggctggtttattgctgataaatctggagccggtgagcgtgggtctcgcggtatcattgcagcactggggccagatggtaagccctcccgtatcgtagttatctacacgacggggagtcaggcaactatggatgaacgaaatagacagatcgctgagataggtgcctcactgattaagcattggtaactgtcagaccaagtttactcatatatactttagattgatttaaaacttcatttttaatttaaaaggatctaggtgaagatcctttttgataatctcatgaccaaaatcccttaacgtgagttttcgttccactgagcgtcagaccccgtagaaaagatcaaaggatcttcttgagatcctttttttctgcgcgtaatctgctgcttgcaaacaaaaaaaccaccgctaccagcggtggtttgtttgccggatcaagagctaccaactctttttccgaaggtaactggcttcagcagagcgcagataccaaatactgttcttctagtgtagccgtagttaggccaccacttcaagaactctgtagcaccgcctacatacctcgctctgctaatcctgttaccagtggctgctgccagtggcgataagtcgtgtcttaccgggttggactcaagacgatagttaccggataaggcgcagcggtcgggctgaacggggggttcgtgcacacagcccagcttggagcgaacgacctacaccgaactgagatacctacagcgtgagctatgagaaagcgccacgcttcccgaagggagaaaggcggacaggtatccggtaagcggcagggtcggaacaggagagcgcacgagggagcttccagggggaaacgcctggtatctttatagtcctgtcgggtttcgccacctctgacttgagcgtcgatttttgtgatgctcgtcaggggggcggagcctatggaaaaacgccagcaacgcggcctttttacggttcctggccttttgctggccttttgctcacatggctcgacagatct

SEQ ID NO: 315 - protein, 449 aa, Artificial Sequence
  HC-F27G/HC-Y104E heavy chain amino acid S119
  DOMAIN (1)...(119): variable domain
  DOMAIN (120)...(217): CH1
  DOMAIN (218)...(232): hinge region
  DOMAIN (233)...(342): CH2
  DOMAIN (343)...(449): CH3
QVQLKQSGPGLVQPSQSLSITCTVSGGSLTNYGVHWVRQSPGKGLEWLGVIWSGGNTDYNTPFTSRLSINKDNSKSQVFFKMNSLQSNDTAIYYCARALTYYDEEFAYWGQGTLVTVSSASTKGPSVFPLAPSSKSTSGGTAALGCLVKDYFPEPVTVSWNSGALTSGVHTFPAVLQSSGLYSLSSVVTVPSSSLGTQTYICNVNHKPSNTKVDKKVEPKSCDKTHTCPPCPAPELLGGPSVFLFPPKPKDTLMISRTPEVTCVVVDVSHEDPEVKFNWYVDGVEVHNAKTKPREEQYNSTYRVVSVLTVLHQDWLNGKEYKCKVSNKALPAPIEKTISKAKGQPREPQVYTLPPSRDELTKNQVSLTCLVKGFYPSDIAVEWESNGQPENNYKTTPPVLDSDGSFFLYSKLTVDKSRWQQGNVFSCSVMHEALHNHYTQKSLSLSPGK

SEQ ID NO: 316 - protein, 119 aa, Artificial Sequence
  HC-F27G/HC-Y104E heavy chain variable domain amino acid S119
QVQLKQSGPGLVQPSQSLSITCTVSGGSLTNYGVHWVRQSPGKGLEWLGVIWSGGNTDYNTPFTSRLSINKDNSKSQVFFKMNSLQSNDTAIYYCARALTYYDEEFAYWGQGTLVTVSS

SEQ ID NO: 317 - protein, 119 aa, Artificial Sequence
  HC-F27G/HC-Y104E heavy chain variable domain amino acid A119
QVQLKQSGPGLVQPSQSLSITCTVSGGSLTNYGVHWVRQSPGKGLEWLGVIWSGGNTDYNTPFTSRLSINKDNSKSQVFFKMNSLQSNDTAIYYCARALTYYDEEFAYWGQGTLVTVSA

SEQ ID NO: 318 - protein, 449 aa, Artificial Sequence
  HC-F27G/HC-Y104E/HC-Q111P heavy chain amino acid S119
  DOMAIN (1)...(119): variable domain
  DOMAIN (120)...(217): CH1
  DOMAIN (218)...(232): hinge region
  DOMAIN (233)...(342): CH2
  DOMAIN (343)...(449): CH3
QVQLKQSGPGLVQPSQSLSITCTVSGGSLTNYGVHWVRQSPGKGLEWLGVIWSGGNTDYNTPFTSRLSINKDNSKSQVFFKMNSLQSNDTAIYYCARALTYYDEEFAYWGPGTLVTVSSASTKGPSVFPLAPSSKSTSGGTAALGCLVKDYFPEPVTVSWNSGALTSGVHTFPAVLQSSGLYSLSSVVTVPSSSLGTQTYICNVNHKPSNTKVDKKVEPKSCDKTHTCPPCPAPELLGGPSVFLFPPKPKDTLMISRTPEVTCVVVDVSHEDPEVKFNWYVDGVEVHNAKTKPREEQYNSTYRVVSVLTVLHQDWLNGKEYKCKVSNKALPAPIEKTISKAKGQPREPQVYTLPPSRDELTKNQVSLTCLVKGFYPSDIAVEWESNGQPENNYKTTPPVLDSDGSFFLYSKLTVDKSRWQQGNVFSCSVMHEALHNHYTQKSLSLSPGK

SEQ ID NO: 319 - protein, 119 aa, Artificial Sequence
  HC-F27G/HC-Y104E/HC-Q111P heavy chain variable domain amino acid S119
QVQLKQSGPGLVQPSQSLSITCTVSGGSLTNYGVHWVRQSPGKGLEWLGVIWSGGNTDYNTPFTSRLSINKDNSKSQVFFKMNSLQSNDTAIYYCARALTYYDEEFAYWGPGTLVTVSS

SEQ ID NO: 320 - protein, 119 aa, Artificial Sequence
  HC-F27G/HC-Y104E/HC-Q111P heavy chain variable domain amino acid A119
QVQLKQSGPGLVQPSQSLSITCTVSGGSLTNYGVHWVRQSPGKGLEWLGVIWSGGNTDYNTPFTSRLSINKDNSKSQVFFKMNSLQSNDTAIYYCARALTYYDEEFAYWGPGTLVTVSA

SEQ ID NO: 321 - protein, 449 aa, Artificial Sequence
  HC-F27G/HC-S53G/HC-Y104E heavy chain amino acid S119
  DOMAIN (1)...(119): variable domain
  DOMAIN (120)...(217): CH1
  DOMAIN (218)...(232): hinge region
  DOMAIN (233)...(342): CH2
  DOMAIN (343)...(449): CH3
QVQLKQSGPGLVQPSQSLSITCTVSGGSLTNYGVHWVRQSPGKGLEWLGVIWGGGNTDYNTPFTSRLSINKDNSKSQVFFKMNSLQSNDTAIYYCARALTYYDEEFAYWGQGTLVTVSSASTKGPSVFPLAPSSKSTSGGTAALGCLVKDYFPEPVTVSWNSGALTSGVHTFPAVLQSSGLYSLSSVVTVPSSSLGTQTYICNVNHKPSNTKVDKKVEPKSCDKTHTCPPCPAPELLGGPSVFLFPPKPKDTLMISRTPEVTCVVVDVSHEDPEVKFNWYVDGVEVHNAKTKPREEQYNSTYRVVSVLTVLHQDWLNGKEYKCKVSNKALPAPIEKTISKAKGQPREPQVYTLPPSRDELTKNQVSLTCLVKGFYPSDIAVEWESNGQPENNYKTTPPVLDSDGSFFLYSKLTVDKSRWQQGNVFSCSVMHEALHNHYTQKSLSLSPGK

SEQ ID NO: 322 - protein, 119 aa, Artificial Sequence
  HC-F27G/HC-S53G/HC-Y104E heavy chain variable domain amino acid S119
QVQLKQSGPGLVQPSQSLSITCTVSGGSLTNYGVHWVRQSPGKGLEWLGVIWGGGNTDYNTPFTSRLSINKDNSKSQVFFKMNSLQSNDTAIYYCARALTYYDEEFAYWGQGTLVTVSS

SEQ ID NO: 323 - protein, 119 aa, Artificial Sequence
  HC-F27G/HC-S53G/HC-Y104E heavy chain variable domain amino acid A119
QVQLKQSGPGLVQPSQSLSITCTVSGGSLTNYGVHWVRQSPGKGLEWLGVIWGGGNTDYNTPFTSRLSINKDNSKSQVFFKMNSLQSNDTAIYYCARALTYYDEEFAYWGQGTLVTVSA

SEQ ID NO: 324 - protein, 449 aa, Artificial Sequence
  HC-F27G/HC-S53G/HC-Y104E/HC-Q111P heavy chain amino acid S119
  DOMAIN (1)...(119): variable domain
  DOMAIN (120)...(217): CH1
  DOMAIN (218)...(232): hinge region
  DOMAIN (233)...(342): CH2
  DOMAIN (343)...(449): CH3
QVQLKQSGPGLVQPSQSLSITCTVSGGSLTNYGVHWVRQSPGKGLEWLGVIWGGGNTDYNTPFTSRLSINKDNSKSQVFFKMNSLQSNDTAIYYCARALTYYDEEFAYWGPGTLVTVSSASTKGPSVFPLAPSSKSTSGGTAALGCLVKDYFPEPVTVSWNSGALTSGVHTFPAVLQSSGLYSLSSVVTVPSSSLGTQTYICNVNHKPSNTKVDKKVEPKSCDKTHTCPPCPAPELLGGPSVFLFPPKPKDTLMISRTPEVTCVVVDVSHEDPEVKFNWYVDGVEVHNAKTKPREEQYNSTYRVVSVLTVLHQDWLNGKEYKCKVSNKALPAPIEKTISKAKGQPREPQVYTLPPSRDELTKNQVSLTCLVKGFYPSDIAVEWESNGQPENNYKTTPPVLDSDGSFFLYSKLTVDKSRWQQGNVFSCSVMHEALHNHYTQKSLSLSPGK

SEQ ID NO: 325 - protein, 119 aa, Artificial Sequence
  HC-F27G/HC-S53G/HC-Y104E/HC-Q111P heavy chain variable domain amino acid S119
QVQLKQSGPGLVQPSQSLSITCTVSGGSLTNYGVHWVRQSPGKGLEWLGVIWGGGNTDYNTPFTSRLSINKDNSKSQVFFKMNSLQSNDTAIYYCARALTYYDEEFAYWGPGTLVTVSS

SEQ ID NO: 326 - protein, 119 aa, Artificial Sequence
  HC-F27G/HC-S53G/HC-Y104E/HC-Q111P heavy chain variable domain amino acid A119
QVQLKQSGPGLVQPSQSLSITCTVSGGSLTNYGVHWVRQSPGKGLEWLGVIWGGGNTDYNTPFTSRLSINKDNSKSQVFFKMNSLQSNDTAIYYCARALTYYDEEFAYWGPGTLVTVSA

SEQ ID NO: 327 - protein, 18 aa, Artificial Sequence
  Linker
GGSSRSSSSGGGGSGGGG

SEQ ID NO: 328 - protein, 15 aa, Artificial Sequence
  Linker
GSGRSGGGGSGGGGS

SEQ ID NO: 329 - protein, 14 aa, Artificial Sequence
  Linker
EGKSSGSGSESKST

SEQ ID NO: 330 - protein, 15 aa, Artificial Sequence
  Linker
EGKSSGSGSESKSTQ

SEQ ID NO: 331 - protein, 14 aa, Artificial Sequence
  Linker
EGKSSGSGSESKVD

SEQ ID NO: 332 - protein, 14 aa, Artificial Sequence
  Linker
GSTSGSGKSSEGKG

SEQ ID NO: 333 - protein, 18 aa, Artificial Sequence
  Linker
KESGSVSSEQLAQFRSLD

SEQ ID NO: 334 - protein, 16 aa, Artificial Sequence
  Linker
ESGSVSSEELAFRSLD

SEQ ID NO: 335 - protein, 10 aa, Artificial Sequence
  c-Myc
EQKLISEEDL

SEQ ID NO: 336 - protein, 9 aa, Artificial Sequence
  HA
YPYDVPDYA

SEQ ID NO: 337 - protein, 11 aa, Artificial Sequence
  VSV-G
YTDIEMNRLGK

SEQ ID NO: 338 - protein, 11 aa, Artificial Sequence
  HSV
QPELAPEDPED

SEQ ID NO: 339 - protein, 14 aa, Artificial Sequence
  V5
GKPIPNPLLGLDST

SEQ ID NO: 340 - protein, 5 aa, Artificial Sequence
  Poly Arg
RRRRR

SEQ ID NO: 341 - protein, 8 aa, Artificial Sequence
  Strep-tag-II
WSHPQFEK

SEQ ID NO: 342 - protein, 15 aa, Artificial Sequence
  S tag
KETAAAKFERQHMDS

SEQ ID NO: 343 - protein, 22 aa, Artificial Sequence
  3x FLAG tag
DYKDHDGDYKDHDIDYKDDDDK

SEQ ID NO: 344 - protein, 19 aa, Artificial Sequence
  HAT
KDHLIHNVHKEFHAHAHNK

SEQ ID NO: 345 - protein, 38 aa, Artificial Sequence
  SBP
MDEKTTGWRGGHVVEGLAGELEQLRARLEHHPQGQREP

SEQ ID NO: 346 - protein, 5 aa, Artificial Sequence
  Linker
GGGGS

SEQ ID NO: 347 - protein, 10 aa, Artificial Sequence
  Linker
GGGGSGGGGS

SEQ ID NO: 348 - protein, 20 aa, Artificial Sequence
  Linker
GGGGSGGGGSGGGGSGGGGS

SEQ ID NO: 349 - protein, 25 aa, Artificial Sequence
  Linker
GGGGSGGGGSGGGGSGGGGSGGGGS

SEQ ID NO: 350 - protein, 24 aa, Artificial Sequence
  Modified Pseudomonas endotoxin sorting signal (Xaa-Asp-Glu-Leu)n, where n = 1-6
  REPEAT (1)...(4): occurring 1, 2, 3, 4, 5, or 6 times
  VARIANT (1)...(1): Xaa = Lys or Arg
  VARIANT (5)...(5): Xaa = Lys or Arg
  VARIANT (9)...(9): Xaa = Lys or Arg
  VARIANT (13)...(13): Xaa = Lys or Arg
  VARIANT (17)...(17): Xaa = Lys or Arg
  VARIANT (21)...(21): Xaa = Lys or Arg
  VARIANT (5)...(24): these amino acids can be present or absent
XDELXDELXDELXDELXDELXDEL

SEQ ID NO: 351 - protein, 4 aa, Artificial Sequence
  Ala-Leu-Ala-Ala Peptide linker
ALAA

SEQ ID NO: 352 - protein, 449 aa, Artificial Sequence
  HC-S25C/HC-Y104D heavy chain amino acid S119
  DOMAIN (1)...(119): variable domain
  DOMAIN (120)...(217): CH1
  DOMAIN (218)...(232): hinge region
  DOMAIN (233)...(342): CH2
  DOMAIN (343)...(449): CH3
QVQLKQSGPGLVQPSQSLSITCTVCGFSLTNYGVHWVRQSPGKGLEWLGVIWSGGNTDYNTPFTSRLSINKDNSKSQVFFKMNSLQSNDTAIYYCARALTYYDDEFAYWGQGTLVTVSSASTKGPSVFPLAPSSKSTSGGTAALGCLVKDYFPEPVTVSWNSGALTSGVHTFPAVLQSSGLYSLSSVVTVPSSSLGTQTYICNVNHKPSNTKVDKKVEPKSCDKTHTCPPCPAPELLGGPSVFLFPPKPKDTLMISRTPEVTCVVVDVSHEDPEVKFNWYVDGVEVHNAKTKPREEQYNSTYRVVSVLTVLHQDWLNGKEYKCKVSNKALPAPIEKTISKAKGQPREPQVYTLPPSRDELTKNQVSLTCLVKGFYPSDIAVEWESNGQPENNYKTTPPVLDSDGSFFLYSKLTVDKSRWQQGNVFSCSVMHEALHNHYTQKSLSLSPGK

SEQ ID NO: 353 - protein, 449 aa, Artificial Sequence
  HC-S53G/HC-Y104D heavy chain amino acid S119
  DOMAIN (1)...(119): variable domain
  DOMAIN (120)...(217): CH1
  DOMAIN (218)...(232): hinge region
  DOMAIN (233)...(342): CH2
  DOMAIN (343)...(449): CH3
QVQLKQSGPGLVQPSQSLSITCTVSGFSLTNYGVHWVRQSPGKGLEWLGVIWGGGNTDYNTPFTSRLSINKDNSKSQVFFKMNSLQSNDTAIYYCARALTYYDDEFAYWGQGTLVTVSSASTKGPSVFPLAPSSKSTSGGTAALGCLVKDYFPEPVTVSWNSGALTSGVHTFPAVLQSSGLYSLSSVVTVPSSSLGTQTYICNVNHKPSNTKVDKKVEPKSCDKTHTCPPCPAPELLGGPSVFLFPPKPKDTLMISRTPEVTCVVVDVSHEDPEVKFNWYVDGVEVHNAKTKPREEQYNSTYRVVSVLTVLHQDWLNGKEYKCKVSNKALPAPIEKTISKAKGQPREPQVYTLPPSRDELTKNQVSLTCLVKGFYPSDIAVEWESNGQPENNYKTTPPVLDSDGSFFLYSKLTVDKSRWQQGNVFSCSVMHEALHNHYTQKSLSLSPGK

SEQ ID NO: 354 - protein, 449 aa, Artificial Sequence
  HC-S53G/HC-Y104D/HC-Q111P heavy chain amino acid S119
  DOMAIN (1)...(119): variable domain
  DOMAIN (120)...(217): CH1
  DOMAIN (218)...(232): hinge region
  DOMAIN (233)...(342): CH2
  DOMAIN (343)...(449): CH3
QVQLKQSGPGLVQPSQSLSITCTVSGFSLTNYGVHWVRQSPGKGLEWLGVIWGGGNTDYNTPFTSRLSINKDNSKSQVFFKMNSLQSNDTAIYYCARALTYYDDEFAYWGPGTLVTVSSASTKGPSVFPLAPSSKSTSGGTAALGCLVKDYFPEPVTVSWNSGALTSGVHTFPAVLQSSGLYSLSSVVTVPSSSLGTQTYICNVNHKPSNTKVDKKVEPKSCDKTHTCPPCPAPELLGGPSVFLFPPKPKDTLMISRTPEVTCVVVDVSHEDPEVKFNWYVDGVEVHNAKTKPREEQYNSTYRVVSVLTVLHQDWLNGKEYKCKVSNKALPAPIEKTISKAKGQPREPQVYTLPPSRDELTKNQVSLTCLVKGFYPSDIAVEWESNGQPENNYKTTPPVLDSDGSFFLYSKLTVDKSRWQQGNVFSCSVMHEALHNHYTQKSLSLSPGK

SEQ ID NO: 355 - protein, 449 aa, Artificial Sequence
  HC-S25V/HC-Y104D heavy chain amino acid S119
  DOMAIN (1)...(119): variable domain
  DOMAIN (120)...(217): CH1
  DOMAIN (218)...(232): hinge region
  DOMAIN (233)...(342): CH2
  DOMAIN (343)...(449): CH3
QVQLKQSGPGLVQPSQSLSITCTVVGFSLTNYGVHWVRQSPGKGLEWLGVIWSGGNTDYNTPFTSRLSINKDNSKSQVFFKMNSLQSNDTAIYYCARALTYYDDEFAYWGQGTLVTVSSASTKGPSVFPLAPSSKSTSGGTAALGCLVKDYFPEPVTVSWNSGALTSGVHTFPAVLQSSGLYSLSSVVTVPSSSLGTQTYICNVNHKPSNTKVDKKVEPKSCDKTHTCPPCPAPELLGGPSVFLFPPKPKDTLMISRTPEVTCVVVDVSHEDPEVKFNWYVDGVEVHNAKTKPREEQYNSTYRVVSVLTVLHQDWLNGKEYKCKVSNKALPAPIEKTISKAKGQPREPQVYTLPPSRDELTKNQVSLTCLVKGFYPSDIAVEWESNGQPENNYKTTPPVLDSDGSFFLYSKLTVDKSRWQQGNVFSCSVMHEALHNHYTQKSLSLSPGK

SEQ ID NO: 356 - protein, 449 aa, Artificial Sequence
  HC-S25V/HC-Y104D/HC-Q111P heavy chain amino acid S119
  DOMAIN (1)...(119): variable domain
  DOMAIN (120)...(217): CH1
  DOMAIN (218)...(232): hinge region
  DOMAIN (233)...(342): CH2
  DOMAIN (343)...(449): CH3
QVQLKQSGPGLVQPSQSLSITCTVVGFSLTNYGVHWVRQSPGKGLEWLGVIWSGGNTDYNTPFTSRLSINKDNSKSQVFFKMNSLQSNDTAIYYCARALTYYDDEFAYWGPGTLVTVSSASTKGPSVFPLAPSSKSTSGGTAALGCLVKDYFPEPVTVSWNSGALTSGVHTFPAVLQSSGLYSLSSVVTVPSSSLGTQTYICNVNHKPSNTKVDKKVEPKSCDKTHTCPPCPAPELLGGPSVFLFPPKPKDTLMISRTPEVTCVVVDVSHEDPEVKFNWYVDGVEVHNAKTKPREEQYNSTYRVVSVLTVLHQDWLNGKEYKCKVSNKALPAPIEKTISKAKGQPREPQVYTLPPSRDELTKNQVSLTCLVKGFYPSDIAVEWESNGQPENNYKTTPPVLDSDGSFFLYSKLTVDKSRWQQGNVFSCSVMHEALHNHYTQKSLSLSPGK

SEQ ID NO: 357 - protein, 449 aa, Artificial Sequence
  HC-S25V/HC-S53G/HC-Y104D heavy chain amino acid S119
  DOMAIN (1)...(119): variable domain
  DOMAIN (120)...(217): CH1
  DOMAIN (218)...(232): hinge region
  DOMAIN (233)...(342): CH2
  DOMAIN (343)...(449): CH3
QVQLKQSGPGLVQPSQSLSITCTVVGFSLTNYGVHWVRQSPGKGLEWLGVIWGGGNTDYNTPFTSRLSINKDNSKSQVFFKMNSLQSNDTAIYYCARALTYYDDEFAYWGQGTLVTVSSASTKGPSVFPLAPSSKSTSGGTAALGCLVKDYFPEPVTVSWNSGALTSGVHTFPAVLQSSGLYSLSSVVTVPSSSLGTQTYICNVNHKPSNTKVDKKVEPKSCDKTHTCPPCPAPELLGGPSVFLFPPKPKDTLMISRTPEVTCVVVDVSHEDPEVKFNWYVDGVEVHNAKTKPREEQYNSTYRVVSVLTVLHQDWLNGKEYKCKVSNKALPAPIEKTISKAKGQPREPQVYTLPPSRDELTKNQVSLTCLVKGFYPSDIAVEWESNGQPENNYKTTPPVLDSDGSFFLYSKLTVDKSRWQQGNVFSCSVMHEALHNHYTQKSLSLSPGK

SEQ ID NO: 358 - protein, 449 aa, Artificial Sequence
  HC-S25V/HC-S53G/HC-Y104D/HC-Q111P heavy chain amino acid S119
  DOMAIN (1)...(119): variable domain
  DOMAIN (120)...(217): CH1
  DOMAIN (218)...(232): hinge region
  DOMAIN (233)...(342): CH2
  DOMAIN (343)...(449): CH3
QVQLKQSGPGLVQPSQSLSITCTVVGFSLTNYGVHWVRQSPGKGLEWLGVIWGGGNTDYNTPFTSRLSINKDNSKSQVFFKMNSLQSNDTAIYYCARALTYYDDEFAYWGPGTLVTVSSASTKGPSVFPLAPSSKSTSGGTAALGCLVKDYFPEPVTVSWNSGALTSGVHTFPAVLQSSGLYSLSSVVTVPSSSLGTQTYICNVNHKPSNTKVDKKVEPKSCDKTHTCPPCPAPELLGGPSVFLFPPKPKDTLMISRTPEVTCVVVDVSHEDPEVKFNWYVDGVEVHNAKTKPREEQYNSTYRVVSVLTVLHQDWLNGKEYKCKVSNKALPAPIEKTISKAKGQPREPQVYTLPPSRDELTKNQVSLTCLVKGFYPSDIAVEWESNGQPENNYKTTPPVLDSDGSFFLYSKLTVDKSRWQQGNVFSCSVMHEALHNHYTQKSLSLSPGK

SEQ ID NO: 359 - protein, 449 aa, Artificial Sequence
  HC-T30F/HC-Y104D heavy chain amino acid S119
  DOMAIN (1)...(119): variable domain
  DOMAIN (120)...(217): CH1
  DOMAIN (218)...(232): hinge region
  DOMAIN (233)...(342): CH2
  DOMAIN (343)...(449): CH3
QVQLKQSGPGLVQPSQSLSITCTVSGFSLFNYGVHWVRQSPGKGLEWLGVIWSGGNTDYNTPFTSRLSINKDNSKSQVFFKMNSLQSNDTAIYYCARALTYYDDEFAYWGQGTLVTVSSASTKGPSVFPLAPSSKSTSGGTAALGCLVKDYFPEPVTVSWNSGALTSGVHTFPAVLQSSGLYSLSSVVTVPSSSLGTQTYICNVNHKPSNTKVDKKVEPKSCDKTHTCPPCPAPELLGGPSVFLFPPKPKDTLMISRTPEVTCVVVDVSHEDPEVKFNWYVDGVEVHNAKTKPREEQYNSTYRVVSVLTVLHQDWLNGKEYKCKVSNKALPAPIEKTISKAKGQPREPQVYTLPPSRDELTKNQVSLTCLVKGFYPSDIAVEWESNGQPENNYKTTPPVLDSDGSFFLYSKLTVDKSRWQQGNVFSCSVMHEALHNHYTQKSLSLSPGK

SEQ ID NO: 360 - protein, 449 aa, Artificial Sequence
  HC-T30F/HC-Y104D/HC-Q111P heavy chain amino acid S119
  DOMAIN (1)...(119): variable domain
  DOMAIN (120)...(217): CH1
  DOMAIN (218)...(232): hinge region
  DOMAIN (233)...(342): CH2
  DOMAIN (343)...(449): CH3
QVQLKQSGPGLVQPSQSLSITCTVSGFSLFNYGVHWVRQSPGKGLEWLGVIWSGGNTDYNTPFTSRLSINKDNSKSQVFFKMNSLQSNDTAIYYCARALTYYDDEFAYWGPGTLVTVSSASTKGPSVFPLAPSSKSTSGGTAALGCLVKDYFPEPVTVSWNSGALTSGVHTFPAVLQSSGLYSLSSVVTVPSSSLGTQTYICNVNHKPSNTKVDKKVEPKSCDKTHTCPPCPAPELLGGPSVFLFPPKPKDTLMISRTPEVTCVVVDVSHEDPEVKFNWYVDGVEVHNAKTKPREEQYNSTYRVVSVLTVLHQDWLNGKEYKCKVSNKALPAPIEKTISKAKGQPREPQVYTLPPSRDELTKNQVSLTCLVKGFYPSDIAVEWESNGQPENNYKTTPPVLDSDGSFFLYSKLTVDKSRWQQGNVFSCSVMHEALHNHYTQKSLSLSPGK

SEQ ID NO: 361 - protein, 449 aa, Artificial Sequence
  HC-T30F/HC-S53G/HC-Y104D heavy chain amino acid S119
  DOMAIN (1)...(119): variable domain
  DOMAIN (120)...(217): CH1
  DOMAIN (218)...(232): hinge region
  DOMAIN (233)...(342): CH2
  DOMAIN (343)...(449): CH3
QVQLKQSGPGLVQPSQSLSITCTVSGFSLFNYGVHWVRQSPGKGLEWLGVIWGGGNTDYNTPFTSRLSINKDNSKSQVFFKMNSLQSNDTAIYYCARALTYYDDEFAYWGQGTLVTVSSASTKGPSVFPLAPSSKSTSGGTAALGCLVKDYFPEPVTVSWNSGALTSGVHTFPAVLQSSGLYSLSSVVTVPSSSLGTQTYICNVNHKPSNTKVDKKVEPKSCDKTHTCPPCPAPELLGGPSVFLFPPKPKDTLMISRTPEVTCVVVDVSHEDPEVKFNWYVDGVEVHNAKTKPREEQYNSTYRVVSVLTVLHQDWLNGKEYKCKVSNKALPAPIEKTISKAKGQPREPQVYTLPPSRDELTKNQVSLTCLVKGFYPSDIAVEWESNGQPENNYKTTPPVLDSDGSFFLYSKLTVDKSRWQQGNVFSCSVMHEALHNHYTQKSLSLSPGK

SEQ ID NO: 362 - protein, 449 aa, Artificial Sequence
  HC-T30F/HC-S53G/HC-Y104D/HC-Q111P heavy chain amino acid S119
  DOMAIN (1)...(119): variable domain
  DOMAIN (120)...(217): CH1
  DOMAIN (218)...(232): hinge region
  DOMAIN (233)...(342): CH2
  DOMAIN (343)...(449): CH3
QVQLKQSGPGLVQPSQSLSITCTVSGFSLFNYGVHWVRQSPGKGLEWLGVIWGGGNTDYNTPFTSRLSINKDNSKSQVFFKMNSLQSNDTAIYYCARALTYYDDEFAYWGPGTLVTVSSASTKGPSVFPLAPSSKSTSGGTAALGCLVKDYFPEPVTVSWNSGALTSGVHTFPAVLQSSGLYSLSSVVTVPSSSLGTQTYICNVNHKPSNTKVDKKVEPKSCDKTHTCPPCPAPELLGGPSVFLFPPKPKDTLMISRTPEVTCVVVDVSHEDPEVKFNWYVDGVEVHNAKTKPREEQYNSTYRVVSVLTVLHQDWLNGKEYKCKVSNKALPAPIEKTISKAKGQPREPQVYTLPPSRDELTKNQVSLTCLVKGFYPSDIAVEWESNGQPENNYKTTPPVLDSDGSFFLYSKLTVDKSRWQQGNVFSCSVMHEALHNHYTQKSLSLSPGK

SEQ ID NO: 363 - protein, 449 aa, Artificial Sequence
  HC-D72L/HC-Y104D heavy chain amino acid S119
  DOMAIN (1)...(119): variable domain
  DOMAIN (120)...(217): CH1
  DOMAIN (218)...(232): hinge region
  DOMAIN (233)...(342): CH2
  DOMAIN (343)...(449): CH3
QVQLKQSGPGLVQPSQSLSITCTVSGFSLTNYGVHWVRQSPGKGLEWLGVIWSGGNTDYNTPFTSRLSINKLNSKSQVFFKMNSLQSNDTAIYYCARALTYYDDEFAYWGQGTLVTVSSASTKGPSVFPLAPSSKSTSGGTAALGCLVKDYFPEPVTVSWNSGALTSGVHTFPAVLQSSGLYSLSSVVTVPSSSLGTQTYICNVNHKPSNTKVDKKVEPKSCDKTHTCPPCPAPELLGGPSVFLFPPKPKDTLMISRTPEVTCVVVDVSHEDPEVKFNWYVDGVEVHNAKTKPREEQYNSTYRVVSVLTVLHQDWLNGKEYKCKVSNKALPAPIEKTISKAKGQPREPQVYTLPPSRDELTKNQVSLTCLVKGFYPSDIAVEWESNGQPENNYKTTPPVLDSDGSFFLYSKLTVDKSRWQQGNVFSCSVMHEALHNHYTQKSLSLSPGK

SEQ ID NO: 364 - protein, 449 aa, Artificial Sequence
  HC-D72L/HC-Y104D/HC-Q111P heavy chain amino acid S119
  DOMAIN (1)...(119): variable domain
  DOMAIN (120)...(217): CH1
  DOMAIN (218)...(232): hinge region
  DOMAIN (233)...(342): CH2
  DOMAIN (343)...(449): CH3
QVQLKQSGPGLVQPSQSLSITCTVSGFSLTNYGVHWVRQSPGKGLEWLGVIWSGGNTDYNTPFTSRLSINKLNSKSQVFFKMNSLQSNDTAIYYCARALTYYDDEFAYWGPGTLVTVSSASTKGPSVFPLAPSSKSTSGGTAALGCLVKDYFPEPVTVSWNSGALTSGVHTFPAVLQSSGLYSLSSVVTVPSSSLGTQTYICNVNHKPSNTKVDKKVEPKSCDKTHTCPPCPAPELLGGPSVFLFPPKPKDTLMISRTPEVTCVVVDVSHEDPEVKFNWYVDGVEVHNAKTKPREEQYNSTYRVVSVLTVLHQDWLNGKEYKCKVSNKALPAPIEKTISKAKGQPREPQVYTLPPSRDELTKNQVSLTCLVKGFYPSDIAVEWESNGQPENNYKTTPPVLDSDGSFFLYSKLTVDKSRWQQGNVFSCSVMHEALHNHYTQKSLSLSPGK

SEQ ID NO: 365 - protein, 449 aa, Artificial Sequence
  HC-S53G/HC-D72L/HC-Y104D heavy chain amino acid S119
  DOMAIN (1)...(119): variable domain
  DOMAIN (120)...(217): CH1
  DOMAIN (218)...(232): hinge region
  DOMAIN (233)...(342): CH2
  DOMAIN (343)...(449): CH3
QVQLKQSGPGLVQPSQSLSITCTVSGFSLTNYGVHWVRQSPGKGLEWLGVIWGGGNTDYNTPFTSRLSINKLNSKSQVFFKMNSLQSNDTAIYYCARALTYYDDEFAYWGQGTLVTVSSASTKGPSVFPLAPSSKSTSGGTAALGCLVKDYFPEPVTVSWNSGALTSGVHTFPAVLQSSGLYSLSSVVTVPSSSLGTQTYICNVNHKPSNTKVDKKVEPKSCDKTHTCPPCPAPELLGGPSVFLFPPKPKDTLMISRTPEVTCVVVDVSHEDPEVKFNWYVDGVEVHNAKTKPREEQYNSTYRVVSVLTVLHQDWLNGKEYKCKVSNKALPAPIEKTISKAKGQPREPQVYTLPPSRDELTKNQVSLTCLVKGFYPSDIAVEWESNGQPENNYKTTPPVLDSDGSFFLYSKLTVDKSRWQQGNVFSCSVMHEALHNHYTQKSLSLSPGK

SEQ ID NO: 366 - protein, 449 aa, Artificial Sequence
  HC-S53G/HC-D72L/HC-Y104D/HC-Q111P heavy chain amino acid S119
  DOMAIN (1)...(119): variable domain
  DOMAIN (120)...(217): CH1
  DOMAIN (218)...(232): hinge region
  DOMAIN (233)...(342): CH2
  DOMAIN (343)...(449): CH3
QVQLKQSGPGLVQPSQSLSITCTVSGFSLTNYGVHWVRQSPGKGLEWLGVIWGGGNTDYNTPFTSRLSINKLNSKSQVFFKMNSLQSNDTAIYYCARALTYYDDEFAYWGPGTLVTVSSASTKGPSVFPLAPSSKSTSGGTAALGCLVKDYFPEPVTVSWNSGALTSGVHTFPAVLQSSGLYSLSSVVTVPSSSLGTQTYICNVNHKPSNTKVDKKVEPKSCDKTHTCPPCPAPELLGGPSVFLFPPKPKDTLMISRTPEVTCVVVDVSHEDPEVKFNWYVDGVEVHNAKTKPREEQYNSTYRVVSVLTVLHQDWLNGKEYKCKVSNKALPAPIEKTISKAKGQPREPQVYTLPPSRDELTKNQVSLTCLVKGFYPSDIAVEWESNGQPENNYKTTPPVLDSDGSFFLYSKLTVDKSRWQQGNVFSCSVMHEALHNHYTQKSLSLSPGK

SEQ ID NO: 367 - protein, 449 aa, Artificial Sequence
  HC-F27G/HC-Y104D heavy chain amino acid S119
  DOMAIN (1)...(119): variable domain
  DOMAIN (120)...(217): CH1
  DOMAIN (218)...(232): hinge region
  DOMAIN (233)...(342): CH2
  DOMAIN (343)...(449): CH3
QVQLKQSGPGLVQPSQSLSITCTVSGGSLTNYGVHWVRQSPGKGLEWLGVIWSGGNTDYNTPFTSRLSINKDNSKSQVFFKMNSLQSNDTAIYYCARALTYYDDEFAYWGQGTLVTVSSASTKGPSVFPLAPSSKSTSGGTAALGCLVKDYFPEPVTVSWNSGALTSGVHTFPAVLQSSGLYSLSSVVTVPSSSLGTQTYICNVNHKPSNTKVDKKVEPKSCDKTHTCPPCPAPELLGGPSVFLFPPKPKDTLMISRTPEVTCVVVDVSHEDPEVKFNWYVDGVEVHNAKTKPREEQYNSTYRVVSVLTVLHQDWLNGKEYKCKVSNKALPAPIEKTISKAKGQPREPQVYTLPPSRDELTKNQVSLTCLVKGFYPSDIAVEWESNGQPENNYKTTPPVLDSDGSFFLYSKLTVDKSRWQQGNVFSCSVMHEALHNHYTQKSLSLSPGK

SEQ ID NO: 368 - protein, 449 aa, Artificial Sequence
  HC-F27G/HC-Y104D/HC-Q111P heavy chain amino acid S119
  DOMAIN (1)...(119): variable domain
  DOMAIN (120)...(217): CH1
  DOMAIN (218)...(232): hinge region
  DOMAIN (233)...(342): CH2
  DOMAIN (343)...(449): CH3
QVQLKQSGPGLVQPSQSLSITCTVSGGSLTNYGVHWVRQSPGKGLEWLGVIWSGGNTDYNTPFTSRLSINKDNSKSQVFFKMNSLQSNDTAIYYCARALTYYDDEFAYWGPGTLVTVSSASTKGPSVFPLAPSSKSTSGGTAALGCLVKDYFPEPVTVSWNSGALTSGVHTFPAVLQSSGLYSLSSVVTVPSSSLGTQTYICNVNHKPSNTKVDKKVEPKSCDKTHTCPPCPAPELLGGPSVFLFPPKPKDTLMISRTPEVTCVVVDVSHEDPEVKFNWYVDGVEVHNAKTKPREEQYNSTYRVVSVLTVLHQDWLNGKEYKCKVSNKALPAPIEKTISKAKGQPREPQVYTLPPSRDELTKNQVSLTCLVKGFYPSDIAVEWESNGQPENNYKTTPPVLDSDGSFFLYSKLTVDKSRWQQGNVFSCSVMHEALHNHYTQKSLSLSPGK

SEQ ID NO: 369 - protein, 449 aa, Artificial Sequence
  HC-F27G/HC-S53G/HC-Y104D heavy chain amino acid S119
  DOMAIN (1)...(119): variable domain
  DOMAIN (120)...(217): CH1
  DOMAIN (218)...(232): hinge region
  DOMAIN (233)...(342): CH2
  DOMAIN (343)...(449): CH3
QVQLKQSGPGLVQPSQSLSITCTVSGGSLTNYGVHWVRQSPGKGLEWLGVIWGGGNTDYNTPFTSRLSINKDNSKSQVFFKMNSLQSNDTAIYYCARALTYYDDEFAYWGQGTLVTVSSASTKGPSVFPLAPSSKSTSGGTAALGCLVKDYFPEPVTVSWNSGALTSGVHTFPAVLQSSGLYSLSSVVTVPSSSLGTQTYICNVNHKPSNTKVDKKVEPKSCDKTHTCPPCPAPELLGGPSVFLFPPKPKDTLMISRTPEVTCVVVDVSHEDPEVKFNWYVDGVEVHNAKTKPREEQYNSTYRVVSVLTVLHQDWLNGKEYKCKVSNKALPAPIEKTISKAKGQPREPQVYTLPPSRDELTKNQVSLTCLVKGFYPSDIAVEWESNGQPENNYKTTPPVLDSDGSFFLYSKLTVDKSRWQQGNVFSCSVMHEALHNHYTQKSLSLSPGK

SEQ ID NO: 370 - protein, 449 aa, Artificial Sequence
  HC-F27G/HC-S53G/HC-Y104D/HC-Q111P heavy chain amino acid S119
  DOMAIN (1)...(119): variable domain
  DOMAIN (120)...(217): CH1
  DOMAIN (218)...(232): hinge region
  DOMAIN (233)...(342): CH2
  DOMAIN (343)...(449): CH3
QVQLKQSGPGLVQPSQSLSITCTVSGGSLTNYGVHWVRQSPGKGLEWLGVIWGGGNTDYNTPFTSRLSINKDNSKSQVFFKMNSLQSNDTAIYYCARALTYYDDEFAYWGPGTLVTVSSASTKGPSVFPLAPSSKSTSGGTAALGCLVKDYFPEPVTVSWNSGALTSGVHTFPAVLQSSGLYSLSSVVTVPSSSLGTQTYICNVNHKPSNTKVDKKVEPKSCDKTHTCPPCPAPELLGGPSVFLFPPKPKDTLMISRTPEVTCVVVDVSHEDPEVKFNWYVDGVEVHNAKTKPREEQYNSTYRVVSVLTVLHQDWLNGKEYKCKVSNKALPAPIEKTISKAKGQPREPQVYTLPPSRDELTKNQVSLTCLVKGFYPSDIAVEWESNGQPENNYKTTPPVLDSDGSFFLYSKLTVDKSRWQQGNVFSCSVMHEALHNHYTQKSLSLSPGK

SEQ ID NO: 371 - DNA, 1347 bp, Artificial Sequence
  DP-h1, 2, 4, 5, 6, 8 heavy chain nucleic acid S119
  V_region (1)...(357)
  C_region (358)...(1347)
caggtacagctgcagcagtcaggtccaggactggtgaagccctcgcagaccctctcactcacctgtgccatctctggtttctcattaactaactatggtgtacactggatccgccagcccccagggaaggggctggagtggattggtgtgatatggagtggtggaaacacagactataatacacctttcacatccagattcaccatctccagagatgattcaaagaacacggcgtatctgcaaatgaacagcctgaaaaccgaggacacggccgtgtattactgtgccagagccctcacctactatgatgatgagtttgcttactggggccctggaacgctggtcaccgtcagctcagcctccaccaagggcccatcggtcttccccctggcaccctcctccaagagcacctctgggggcacagcggccctgggctgcctggtcaaggactacttccccgaaccggtgacggtgtcgtggaactcaggcgccctgaccagcggcgtgcacaccttcccggctgtcctacagtcctcaggactctactccctcagcagcgtggtgaccgtgccctccagcagcttgggcacccagacctacatctgcaacgtgaatcacaagcccagcaacaccaaggtggacaagaaagttgagcccaaatcttgtgacaaaactcacacatgcccaccgtgcccagcacctgaactcctggggggaccgtcagtcttcctcttccccccaaaacccaaggacaccctcatgatctcccggacccctgaggtcacatgcgtggtggtggacgtgagccacgaagaccctgaggtcaagttcaactggtacgtggacggcgtggaggtgcataatgccaagacaaagccgcgggaggagcagtacaacagcacgtaccgtgtggtcagcgtcctcaccgtcctgcaccaggactggctgaatggcaaggagtacaagtgcaaggtcagcaacaaagccctcccagcccccatcgagaaaaccatctccaaagccaaagggcagccccgagaaccacaggtgtacaccctgcccccatcccgggatgagctgaccaagaaccaggtcagcctgacctgcctggtcaaaggcttctatcccagcgacatcgccgtggagtgggagagcaatgggcagccggagaacaactacaagaccacgcctcccgtgctggactccgacggctccttcttcctctacagcaagctcaccgtggacaagagcaggtggcagcaggggaacgtcttctcatgctccgtgatgcatgaggctctgcacaaccactacacgcagaagagcctctccctgtctccgggtaaa

SEQ ID NO: 372 - protein, 449 aa, Artificial Sequence
  DP-h1, 2, 4, 5, 6, 8 heavy chain amino acid S119
  DOMAIN (1)...(119): variable domain
  DOMAIN (120)...(217): CH1
  DOMAIN (218)...(232): hinge region
  DOMAIN (233)...(342): CH2
  DOMAIN (343)...(449): CH3
QVQLQQSGPGLVKPSQTLSLTCAISGFSLTNYGVHWIRQPPGKGLEWIGVIWSGGNTDYNTPFTSRFTISRDDSKNTAYLQMNSLKTEDTAVYYCARALTYYDDEFAYWGPGTLVTVSSASTKGPSVFPLAPSSKSTSGGTAALGCLVKDYFPEPVTVSWNSGALTSGVHTFPAVLQSSGLYSLSSVVTVPSSSLGTQTYICNVNHKPSNTKVDKKVEPKSCDKTHTCPPCPAPELLGGPSVFLFPPKPKDTLMISRTPEVTCVVVDVSHEDPEVKFNWYVDGVEVHNAKTKPREEQYNSTYRVVSVLTVLHQDWLNGKEYKCKVSNKALPAPIEKTISKAKGQPREPQVYTLPPSRDELTKNQVSLTCLVKGFYPSDIAVEWESNGQPENNYKTTPPVLDSDGSFFLYSKLTVDKSRWQQGNVFSCSVMHEALHNHYTQKSLSLSPGK

SEQ ID NO: 373 - DNA, 1347 bp, Artificial Sequence
  DP-h9, 12, 14 heavy chain nucleic acid S119
  V_region (1)...(357)
  C_region (358)...(1347)
gaggtccagctggtacagtctggggctgaggtgaagaagcctggggctacagtgaaaatctcctgcaaggtttctggtttctcattaactaactatggtgtacactggatcaggcagtccccatcgagaggccttgagtggctgggtgtgatatggagtggtggaaatacagactataatacacctttcacatccagactcaccatctccaaggacacctccaaaaaccaggtggtccttacaatgaccaacatggaccctgtggacacagccacgtattactgtgccagagccctcacctactatgatgatgagtttgcttactggggccctggaacgctggtcaccgtcagctcagcctccaccaagggcccatcggtcttccccctggcaccctcctccaagagcacctctgggggcacagcggccctgggctgcctggtcaaggactacttccccgaaccggtgacggtgtcgtggaactcaggcgccctgaccagcggcgtgcacaccttcccggctgtcctacagtcctcaggactctactccctcagcagcgtggtgaccgtgccctccagcagcttgggcacccagacctacatctgcaacgtgaatcacaagcccagcaacaccaaggtggacaagaaagttgagcccaaatcttgtgacaaaactcacacatgcccaccgtgcccagcacctgaactcctggggggaccgtcagtcttcctcttccccccaaaacccaaggacaccctcatgatctcccggacccctgaggtcacatgcgtggtggtggacgtgagccacgaagaccctgaggtcaagttcaactggtacgtggacggcgtggaggtgcataatgccaagacaaagccgcgggaggagcagtacaacagcacgtaccgtgtggtcagcgtcctcaccgtcctgcaccaggactggctgaatggcaaggagtacaagtgcaaggtcagcaacaaagccctcccagcccccatcgagaaaaccatctccaaagccaaagggcagccccgagaaccacaggtgtacaccctgcccccatcccgggatgagctgaccaagaaccaggtcagcctgacctgcctggtcaaaggcttctatcccagcgacatcgccgtggagtgggagagcaatgggcagccggagaacaactacaagaccacgcctcccgtgctggactccgacggctccttcttcctctacagcaagctcaccgtggacaagagcaggtggcagcaggggaacgtcttctcatgctccgtgatgcatgaggctctgcacaaccactacacgcagaagagcctctccctgtctccgggtaaa

SEQ ID NO: 374 - protein, 449 aa, Artificial Sequence
  DP-h9, 12, 14 heavy chain amino acid S119
  DOMAIN (1)...(119): variable domain
  DOMAIN (120)...(217): CH1
  DOMAIN (218)...(232): hinge region
  DOMAIN (233)...(342): CH2
  DOMAIN (343)...(449): CH3
EVQLVQSGAEVKKPGATVKISCKVSGFSLTNYGVHWIRQSPSRGLEWLGVIWSGGNTDYNTPFTSRLTISKDTSKNQVVLTMTNMDPVDTATYYCARALTYYDDEFAYWGPGTLVTVSSASTKGPSVFPLAPSSKSTSGGTAALGCLVKDYFPEPVTVSWNSGALTSGVHTFPAVLQSSGLYSLSSVVTVPSSSLGTQTYICNVNHKPSNTKVDKKVEPKSCDKTHTCPPCPAPELLGGPSVFLFPPKPKDTLMISRTPEVTCVVVDVSHEDPEVKFNWYVDGVEVHNAKTKPREEQYNSTYRVVSVLTVLHQDWLNGKEYKCKVSNKALPAPIEKTISKAKGQPREPQVYTLPPSRDELTKNQVSLTCLVKGFYPSDIAVEWESNGQPENNYKTTPPVLDSDGSFFLYSKLTVDKSRWQQGNVFSCSVMHEALHNHYTQKSLSLSPGK

SEQ ID NO: 375 - DNA, 1347 bp, Artificial Sequence
  DP-h10, 13 heavy chain nucleic acid S119
  V_region (1)...(357)
  C_region (358)...(1347)
gaggtccagctggtacagtctggggctgaggtgaagaagcctggggctacagtgaaaatctcctgcaaggtttctggtttctcattaactaactatggtgtacactggatccgccagcccccagggaaggggctggagtggattggtgtgatatggagtggtggaaacacagactataatacacctttcacatccagattcaccatctccagagacaacgccaagaactcactgtatctgcaaatgaacagcctgagagccgaggacacggctgtgtattactgtgccagagccctcacctactatgatgatgagtttgcttactggggccctggaacgctggtcaccgtcagctcagcctccaccaagggcccatcggtcttccccctggcaccctcctccaagagcacctctgggggcacagcggccctgggctgcctggtcaaggactacttccccgaaccggtgacggtgtcgtggaactcaggcgccctgaccagcggcgtgcacaccttcccggctgtcctacagtcctcaggactctactccctcagcagcgtggtgaccgtgccctccagcagcttgggcacccagacctacatctgcaacgtgaatcacaagcccagcaacaccaaggtggacaagaaagttgagcccaaatcttgtgacaaaactcacacatgcccaccgtgcccagcacctgaactcctggggggaccgtcagtcttcctcttccccccaaaacccaaggacaccctcatgatctcccggacccctgaggtcacatgcgtggtggtggacgtgagccacgaagaccctgaggtcaagttcaactggtacgtggacggcgtggaggtgcataatgccaagacaaagccgcgggaggagcagtacaacagcacgtaccgtgtggtcagcgtcctcaccgtcctgcaccaggactggctgaatggcaaggagtacaagtgcaaggtcagcaacaaagccctcccagcccccatcgagaaaaccatctccaaagccaaagggcagccccgagaaccacaggtgtacaccctgcccccatcccgggatgagctgaccaagaaccaggtcagcctgacctgcctggtcaaaggcttctatcccagcgacatcgccgtggagtgggagagcaatgggcagccggagaacaactacaagaccacgcctcccgtgctggactccgacggctccttcttcctctacagcaagctcaccgtggacaagagcaggtggcagcaggggaacgtcttctcatgctccgtgatgcatgaggctctgcacaaccactacacgcagaagagcctctccctgtctccgggtaaa

SEQ ID NO: 376 - protein, 449 aa, Artificial Sequence
  DP-h10, 13 heavy chain amino acid S119
  DOMAIN (1)...(119): variable domain
  DOMAIN (120)...(217): CH1
  DOMAIN (218)...(232): hinge region
  DOMAIN (233)...(342): CH2
  DOMAIN (343)...(449): CH3
EVQLVQSGAEVKKPGATVKISCKVSGFSLTNYGVHWIRQPPGKGLEWIGVIWSGGNTDYNTPFTSRFTISRDNAKNSLYLQMNSLRAEDTAVYYCARALTYYDDEFAYWGPGTLVTVSSASTKGPSVFPLAPSSKSTSGGTAALGCLVKDYFPEPVTVSWNSGALTSGVHTFPAVLQSSGLYSLSSVVTVPSSSLGTQTYICNVNHKPSNTKVDKKVEPKSCDKTHTCPPCPAPELLGGPSVFLFPPKPKDTLMISRTPEVTCVVVDVSHEDPEVKFNWYVDGVEVHNAKTKPREEQYNSTYRVVSVLTVLHQDWLNGKEYKCKVSNKALPAPIEKTISKAKGQPREPQVYTLPPSRDELTKNQVSLTCLVKGFYPSDIAVEWESNGQPENNYKTTPPVLDSDGSFFLYSKLTVDKSRWQQGNVFSCSVMHEALHNHYTQKSLSLSPGK

SEQ ID NO: 377 - DNA, 1347 bp, Artificial Sequence
  FDP-h1, 19, 20, 21 heavy chain nucleic acid S119
  V_region (1)...(357)
  C_region (358)...(1347)
gaggtccagctggtacagtctggggctgaggtgaagaagcctggggctacagtgaaaatctcctgcaaggtttctggtttctcattatttaactatggtgtacactggatccgccagcccccagggaaggggctggagtggattggtgtgatatggagtggtggaaacacagactataatacacctttcacatccagattcaccatctccagagacaattccaagaacacgctgtatcttcaaatgaacagcctgagagccgaggacacggccgtgtattactgtgccagagccctcacctactatgatgatgagtttgcttactggggccctggaacgctggtcaccgtcagctcagcctccaccaagggcccatcggtcttccccctggcaccctcctccaagagcacctctgggggcacagcggccctgggctgcctggtcaaggactacttccccgaaccggtgacggtgtcgtggaactcaggcgccctgaccagcggcgtgcacaccttcccggctgtcctacagtcctcaggactctactccctcagcagcgtggtgaccgtgccctccagcagcttgggcacccagacctacatctgcaacgtgaatcacaagcccagcaacaccaaggtggacaagaaagttgagcccaaatcttgtgacaaaactcacacatgcccaccgtgcccagcacctgaactcctggggggaccgtcagtcttcctcttccccccaaaacccaaggacaccctcatgatctcccggacccctgaggtcacatgcgtggtggtggacgtgagccacgaagaccctgaggtcaagttcaactggtacgtggacggcgtggaggtgcataatgccaagacaaagccgcgggaggagcagtacaacagcacgtaccgtgtggtcagcgtcctcaccgtcctgcaccaggactggctgaatggcaaggagtacaagtgcaaggtcagcaacaaagccctcccagcccccatcgagaaaaccatctccaaagccaaagggcagccccgagaaccacaggtgtacaccctgcccccatcccgggatgagctgaccaagaaccaggtcagcctgacctgcctggtcaaaggcttctatcccagcgacatcgccgtggagtgggagagcaatgggcagccggagaacaactacaagaccacgcctcccgtgctggactccgacggctccttcttcctctacagcaagctcaccgtggacaagagcaggtggcagcaggggaacgtcttctcatgctccgtgatgcatgaggctctgcacaaccactacacgcagaagagcctctccctgtctccgggtaaa

SEQ ID NO: 378 - protein, 449 aa, Artificial Sequence
  FDP-h1, 19, 20, 21 heavy chain amino acid S119
  DOMAIN (1)...(119): variable domain
  DOMAIN (120)...(217): CH1
  DOMAIN (218)...(232): hinge region
  DOMAIN (233)...(342): CH2
  DOMAIN (343)...(449): CH3
EVQLVQSGAEVKKPGATVKISCKVSGFSLFNYGVHWIRQPPGKGLEWIGVIWSGGNTDYNTPFTSRFTISRDNSKNTLYLQMNSLRAEDTAVYYCARALTYYDDEFAYWGPGTLVTVSSASTKGPSVFPLAPSSKSTSGGTAALGCLVKDYFPEPVTVSWNSGALTSGVHTFPAVLQSSGLYSLSSVVTVPSSSLGTQTYICNVNHKPSNTKVDKKVEPKSCDKTHTCPPCPAPELLGGPSVFLFPPKPKDTLMISRTPEVTCVVVDVSHEDPEVKFNWYVDGVEVHNAKTKPREEQYNSTYRVVSVLTVLHQDWLNGKEYKCKVSNKALPAPIEKTISKAKGQPREPQVYTLPPSRDELTKNQVSLTCLVKGFYPSDIAVEWESNGQPENNYKTTPPVLDSDGSFFLYSKLTVDKSRWQQGNVFSCSVMHEALHNHYTQKSLSLSPGK

SEQ ID NO: 379 - DNA, 1347 bp, Artificial Sequence
  FDP-h2 heavy chain nucleic acid S119
  V_region (1)...(357)
  C_region (358)...(1347)
gaggtccagctggtacagtctggggctgaggtgaagaagcctggggctacagtgaaaatctcctgcaaggtttctggtttctcattatttaactatggtgtacactgggtgcgacaggctcgtggacaacgccttgagtggataggtgtgatatggagtggtggaaacacagactataatacacctttcacatccagattcaccatctccagagatgattcaaagaacacggcgtatctgcaaatgaacagcctgaaaaccgaggacacggccgtgtattactgtgccagagccctcacctactatgatgatgagtttgcttactggggccctggaacgctggtcaccgtcagctcagcctccaccaagggcccatcggtcttccccctggcaccctcctccaagagcacctctgggggcacagcggccctgggctgcctggtcaaggactacttccccgaaccggtgacggtgtcgtggaactcaggcgccctgaccagcggcgtgcacaccttcccggctgtcctacagtcctcaggactctactccctcagcagcgtggtgaccgtgccctccagcagcttgggcacccagacctacatctgcaacgtgaatcacaagcccagcaacaccaaggtggacaagaaagttgagcccaaatcttgtgacaaaactcacacatgcccaccgtgcccagcacctgaactcctggggggaccgtcagtcttcctcttccccccaaaacccaaggacaccctcatgatctcccggacccctgaggtcacatgcgtggtggtggacgtgagccacgaagaccctgaggtcaagttcaactggtacgtggacggcgtggaggtgcataatgccaagacaaagccgcgggaggagcagtacaacagcacgtaccgtgtggtcagcgtcctcaccgtcctgcaccaggactggctgaatggcaaggagtacaagtgcaaggtcagcaacaaagccctcccagcccccatcgagaaaaccatctccaaagccaaagggcagccccgagaaccacaggtgtacaccctgcccccatcccgggatgagctgaccaagaaccaggtcagcctgacctgcctggtcaaaggcttctatcccagcgacatcgccgtggagtgggagagcaatgggcagccggagaacaactacaagaccacgcctcccgtgctggactccgacggctccttcttcctctacagcaagctcaccgtggacaagagcaggtggcagcaggggaacgtcttctcatgctccgtgatgcatgaggctctgcacaaccactacacgcagaagagcctctccctgtctccgggtaaa

SEQ ID NO: 380 - protein, 449 aa, Artificial Sequence
  FDP-h2 heavy chain amino acid S119
  DOMAIN (1)...(119): variable domain
  DOMAIN (120)...(217): CH1
  DOMAIN (218)...(232): hinge region
  DOMAIN (233)...(342): CH2
  DOMAIN (343)...(449): CH3
EVQLVQSGAEVKKPGATVKISCKVSGFSLFNYGVHWVRQARGQRLEWIGVIWSGGNTDYNTPFTSRFTISRDDSKNTAYLQMNSLKTEDTAVYYCARALTYYDDEFAYWGPGTLVTVSSASTKGPSVFPLAPSSKSTSGGTAALGCLVKDYFPEPVTVSWNSGALTSGVHTFPAVLQSSGLYSLSSVVTVPSSSLGTQTYICNVNHKPSNTKVDKKVEPKSCDKTHTCPPCPAPELLGGPSVFLFPPKPKDTLMISRTPEVTCVVVDVSHEDPEVKFNWYVDGVEVHNAKTKPREEQYNSTYRVVSVLTVLHQDWLNGKEYKCKVSNKALPAPIEKTISKAKGQPREPQVYTLPPSRDELTKNQVSLTCLVKGFYPSDIAVEWESNGQPENNYKTTPPVLDSDGSFFLYSKLTVDKSRWQQGNVFSCSVMHEALHNHYTQKSLSLSPGK

SEQ ID NO: 381 - DNA, 1347 bp, Artificial Sequence
  FDP-h4, 8, 12, 16 heavy chain nucleic acid S119
  V_region (1)...(357)
  C_region (358)...(1347)
caggtacagctgcagcagtcaggtccaggactggtgaagccctcgcagaccctctcactcacctgtgccatctctggtttctcattatttaactatggtgtacactggatcaggcagtccccatcgagaggccttgagtggctgggtgtgatatggagtggtggaaacacagactataatacacctttcacatccagactcaccatctccaaggacacctccaaaaaccaggtggtccttacaatgaccaacatggaccctgtggacacagccacgtattactgtgccagagccctcacctactatgatgatgagtttgcttactggggccctggaacgctggtcaccgtcagctcagcctccaccaagggcccatcggtcttccccctggcaccctcctccaagagcacctctgggggcacagcggccctgggctgcctggtcaaggactacttccccgaaccggtgacggtgtcgtggaactcaggcgccctgaccagcggcgtgcacaccttcccggctgtcctacagtcctcaggactctactccctcagcagcgtggtgaccgtgccctccagcagcttgggcacccagacctacatctgcaacgtgaatcacaagcccagcaacaccaaggtggacaagaaagttgagcccaaatcttgtgacaaaactcacacatgcccaccgtgcccagcacctgaactcctggggggaccgtcagtcttcctcttccccccaaaacccaaggacaccctcatgatctcccggacccctgaggtcacatgcgtggtggtggacgtgagccacgaagaccctgaggtcaagttcaactggtacgtggacggcgtggaggtgcataatgccaagacaaagccgcgggaggagcagtacaacagcacgtaccgtgtggtcagcgtcctcaccgtcctgcaccaggactggctgaatggcaaggagtacaagtgcaaggtcagcaacaaagccctcccagcccccatcgagaaaaccatctccaaagccaaagggcagccccgagaaccacaggtgtacaccctgcccccatcccgggatgagctgaccaagaaccaggtcagcctgacctgcctggtcaaaggcttctatcccagcgacatcgccgtggagtgggagagcaatgggcagccggagaacaactacaagaccacgcctcccgtgctggactccgacggctccttcttcctctacagcaagctcaccgtggacaagagcaggtggcagcaggggaacgtcttctcatgctccgtgatgcatgaggctctgcacaaccactacacgcagaagagcctctccctgtctccgggtaaa

SEQ ID NO: 382 - protein, 449 aa, Artificial Sequence
  FDP-h4, 8, 12, 16 heavy chain amino acid S119
  DOMAIN (1)...(119): variable domain
  DOMAIN (120)...(217): CH1
  DOMAIN (218)...(232): hinge region
  DOMAIN (233)...(342): CH2
  DOMAIN (343)...(449): CH3
QVQLQQSGPGLVKPSQTLSLTCAISGFSLFNYGVHWIRQSPSRGLEWLGVIWSGGNTDYNTPFTSRLTISKDTSKNQVVLTMTNMDPVDTATYYCARALTYYDDEFAYWGPGTLVTVSSASTKGPSVFPLAPSSKSTSGGTAALGCLVKDYFPEPVTVSWNSGALTSGVHTFPAVLQSSGLYSLSSVVTVPSSSLGTQTYICNVNHKPSNTKVDKKVEPKSCDKTHTCPPCPAPELLGGPSVFLFPPKPKDTLMISRTPEVTCVVVDVSHEDPEVKFNWYVDGVEVHNAKTKPREEQYNSTYRVVSVLTVLHQDWLNGKEYKCKVSNKALPAPIEKTISKAKGQPREPQVYTLPPSRDELTKNQVSLTCLVKGFYPSDIAVEWESNGQPENNYKTTPPVLDSDGSFFLYSKLTVDKSRWQQGNVFSCSVMHEALHNHYTQKSLSLSPGK

SEQ ID NO: 383 - DNA, 1347 bp, Artificial Sequence
  FDP-h5, 9, 13, 17 heavy chain nucleic acid S119
  V_region (1)...(357)
  C_region (358)...(1347)
gaggtccagctggtacagtctggggctgaggtgaagaagcctggggctacagtgaaaatctcctgcaaggtttctggtttttcattatttaactatggtgtacactggatccgccagcccccagggaaggggctggagtggattggtgtgatatggagtggtggaaacacagactataatacacctttcacatccagattcaccatctccagagacaattccaagaacacgctgtatcttcaaatgaacagcctgagagccgaggacacggccgtgtattactgtgccagagccctcacctactatgatgatgagtttgcttactggggccctggaacgctggtcaccgtcagctcagcctccaccaagggcccatcggtcttccccctggcaccctcctccaagagcacctctgggggcacagcggccctgggctgcctggtcaaggactacttccccgaaccggtgacggtgtcgtggaactcaggcgccctgaccagcggcgtgcacaccttcccggctgtcctacagtcctcaggactctactccctcagcagcgtggtgaccgtgccctccagcagcttgggcacccagacctacatctgcaacgtgaatcacaagcccagcaacaccaaggtggacaagaaagttgagcccaaatcttgtgacaaaactcacacatgcccaccgtgcccagcacctgaactcctggggggaccgtcagtcttcctcttccccccaaaacccaaggacaccctcatgatctcccggacccctgaggtcacatgcgtggtggtggacgtgagccacgaagaccctgaggtcaagttcaactggtacgtggacggcgtggaggtgcataatgccaagacaaagccgcgggaggagcagtacaacagcacgtaccgtgtggtcagcgtcctcaccgtcctgcaccaggactggctgaatggcaaggagtacaagtgcaaggtcagcaacaaagccctcccagcccccatcgagaaaaccatctccaaagccaaagggcagccccgagaaccacaggtgtacaccctgcccccatcccgggatgagctgaccaagaaccaggtcagcctgacctgcctggtcaaaggcttctatcccagcgacatcgccgtggagtgggagagcaatgggcagccggagaacaactacaagaccacgcctcccgtgctggactccgacggctccttcttcctctacagcaagctcaccgtggacaagagcaggtggcagcaggggaacgtcttctcatgctccgtgatgcatgaggctctgcacaaccactacacgcagaagagcctctccctgtctccgggtaaa

SEQ ID NO: 384 - protein, 449 aa, Artificial Sequence; identical to SEQ ID NO: 378
  FDP-h5, 9, 13, 17 heavy chain amino acid S119
  DOMAIN (1)...(119): variable domain
  DOMAIN (120)...(217): CH1
  DOMAIN (218)...(232): hinge region
  DOMAIN (233)...(342): CH3
  DOMAIN (343)...(449): CH3

SEQ ID NO: 385 - DNA, 1347 bp, Artificial Sequence
  FDP-h6 heavy chain nucleic acid S119
  V_region (1)...(357)
  C_region (358)...(1347)
gaggtccagctggtacagtctggggctgaggtgaagaagcctggggctacagtgaaaatctcctgcaaggtttctggtttctcattatttaactatggtgtacactggatcaggcagtccccatcgagaggccttgagtggctgggtgtgatatggagtggtggaaacacagactataatacacctttcacatccagattcaccatctccagagacaattccaagaacacgctgtatcttcaaatgaacagcctgagagccgaggacacggccgtgtattactgtgccagagccctcacctactatgatgatgagtttgcttactggggccctggaacgctggtcaccgtcagctcagcctccaccaagggcccatcggtcttccccctggcaccctcctccaagagcacctctgggggcacagcggccctgggctgcctggtcaaggactacttccccgaaccggtgacggtgtcgtggaactcaggcgccctgaccagcggcgtgcacaccttcccggctgtcctacagtcctcaggactctactccctcagcagcgtggtgaccgtgccctccagcagcttgggcacccagacctacatctgcaacgtgaatcacaagcccagcaacaccaaggtggacaagaaagttgagcccaaatcttgtgacaaaactcacacatgcccaccgtgcccagcacctgaactcctggggggaccgtcagtcttcctcttccccccaaaacccaaggacaccctcatgatctcccggacccctgaggtcacatgcgtggtggtggacgtgagccacgaagaccctgaggtcaagttcaactggtacgtggacggcgtggaggtgcataatgccaagacaaagccgcgggaggagcagtacaacagcacgtaccgtgtggtcagcgtcctcaccgtcctgcaccaggactggctgaatggcaaggagtacaagtgcaaggtcagcaacaaagccctcccagcccccatcgagaaaaccatctccaaagccaaagggcagccccgagaaccacaggtgtacaccctgcccccatcccgggatgagctgaccaagaaccaggtcagcctgacctgcctggtcaaaggcttctatcccagcgacatcgccgtggagtgggagagcaatgggcagccggagaacaactacaagaccacgcctcccgtgctggactccgacggctccttcttcctctacagcaagctcaccgtggacaagagcaggtggcagcaggggaacgtcttctcatgctccgtgatgcatgaggctctgcacaaccactacacgcagaagagcctctccctgtctccgggtaaa

SEQ ID NO: 386 - protein, 449 aa, Artificial Sequence
  FDP-h6 heavy chain amino acid S119
  DOMAIN (1)...(119): variable domain
  DOMAIN (120)...(217): CH1
  DOMAIN (218)...(232): hinge region
  DOMAIN (233)...(342): CH2
  DOMAIN (343)...(449): CH3
EVQLVQSGAEVKKPGATVKISCKVSGFSLFNYGVHWIRQSPSRGLEWLGVIWSGGNTDYNTPFTSRFTISRDNSKNTLYLQMNSLRAEDTAVYYCARALTYYDDEFAYWGPGTLVTVSSASTKGPSVFPLAPSSKSTSGGTAALGCLVKDYFPEPVTVSWNSGALTSGVHTFPAVLQSSGLYSLSSVVTVPSSSLGTQTYICNVNHKPSNTKVDKKVEPKSCDKTHTCPPCPAPELLGGPSVFLFPPKPKDTLMISRTPEVTCVVVDVSHEDPEVKFNWYVDGVEVHNAKTKPREEQYNSTYRVVSVLTVLHQDWLNGKEYKCKVSNKALPAPIEKTISKAKGQPREPQVYTLPPSRDELTKNQVSLTCLVKGFYPSDIAVEWESNGQPENNYKTTPPVLDSDGSFFLYSKLTVDKSRWQQGNVFSCSVMHEALHNHYTQKSLSLSPGK

SEQ ID NO: 387 - DNA, 1347 bp, Artificial Sequence
  FDP-h10, 14, 18 heavy chain nucleic acid S119
  V_region (1)...(357)
  C_region (358)...(1347)
gaggtccagctggtacagtctggggctgaggtgaagaagcctggggctacagtgaaaatctcctgcaaggtttctggtttctcattatttaactatggtgtacactggatccgccagcccccagggaaggggctggagtggattggtgtgatatggagtggtggaaacacagactataatacacctttcacatccagattcaccatctccagagatgattcaaagaacacggcgtatctgcaaatgaacagcctgaaaaccgaggacacggccgtgtattactgtgccagagccctcacctactatgatgatgagtttgcttactggggccctggaacgctggtcaccgtcagctcagcctccaccaagggcccatcggtcttccccctggcaccctcctccaagagcacctctgggggcacagcggccctgggctgcctggtcaaggactacttccccgaaccggtgacggtgtcgtggaactcaggcgccctgaccagcggcgtgcacaccttcccggctgtcctacagtcctcaggactctactccctcagcagcgtggtgaccgtgccctccagcagcttgggcacccagacctacatctgcaacgtgaatcacaagcccagcaacaccaaggtggacaagaaagttgagcccaaatcttgtgacaaaactcacacatgcccaccgtgcccagcacctgaactcctggggggaccgtcagtcttcctcttccccccaaaacccaaggacaccctcatgatctcccggacccctgaggtcacatgcgtggtggtggacgtgagccacgaagaccctgaggtcaagttcaactggtacgtggacggcgtggaggtgcataatgccaagacaaagccgcgggaggagcagtacaacagcacgtaccgtgtggtcagcgtcctcaccgtcctgcaccaggactggctgaatggcaaggagtacaagtgcaaggtcagcaacaaagccctcccagcccccatcgagaaaaccatctccaaagccaaagggcagccccgagaaccacaggtgtacaccctgcccccatcccgggatgagctgaccaagaaccaggtcagcctgacctgcctggtcaaaggcttctatcccagcgacatcgccgtggagtgggagagcaatgggcagccggagaacaactacaagaccacgcctcccgtgctggactccgacggctccttcttcctctacagcaagctcaccgtggacaagagcaggtggcagcaggggaacgtcttctcatgctccgtgatgcatgaggctctgcacaaccactacacgcagaagagcctctccctgtctccgggtaaa

SEQ ID NO: 388 - protein, 449 aa, Artificial Sequence
  FDP-h10, 14, 18 heavy chain amino acid S119
  DOMAIN (1)...(119): variable domain
  DOMAIN (120)...(217): CH1
  DOMAIN (218)...(232): hinge region
  DOMAIN (233)...(342): CH2
  DOMAIN (343)...(449): CH3
EVQLVQSGAEVKKPGATVKISCKVSGFSLFNYGVHWIRQPPGKGLEWIGVIWSGGNTDYNTPFTSRFTISRDDSKNTAYLQMNSLKTEDTAVYYCARALTYYDDEFAYWGPGTLVTVSSASTKGPSVFPLAPSSKSTSGGTAALGCLVKDYFPEPVTVSWNSGALTSGVHTFPAVLQSSGLYSLSSVVTVPSSSLGTQTYICNVNHKPSNTKVDKKVEPKSCDKTHTCPPCPAPELLGGPSVFLFPPKPKDTLMISRTPEVTCVVVDVSHEDPEVKFNWYVDGVEVHNAKTKPREEQYNSTYRVVSVLTVLHQDWLNGKEYKCKVSNKALPAPIEKTISKAKGQPREPQVYTLPPSRDELTKNQVSLTCLVKGFYPSDIAVEWESNGQPENNYKTTPPVLDSDGSFFLYSKLTVDKSRWQQGNVFSCSVMHEALHNHYTQKSLSLSPGK

SEQ ID NO: 389 - protein, 245 aa, Artificial Sequence
  Bryodin
DVSFRLSGATTTSYGVFIKNLREALPYERKVYNIPLLRSSISGRYTLLHLTNYADETISVAVDVTNVYIMGYLAGDVSYFFNEASATEAAKFVFKDAKKKVTLPYSGNYERLQTAAGKIRENIPLGLPALDSAITTLYYYTASSAASALLVLIQSTAESARYKFIEQQIGKRVDKTFLPSLATISLENNWSALSKQIQIASTNNGQFESPVVLIDGNNQRVSITNASARVVTSNIALLLNRNNIA

SEQ ID NO: 390 - protein, 274 aa, Artificial Sequence
  Saporin-6
VTSITLDLVNPTAGQYSSFVDKIRNNVKDPNLKYGGTDIAVIPPSKEKFLRINFQSSRGTVSLGLKRDNLYVVAYLAMDNTNVNRAYYFRSEITSAESTALFPEATTANQKALEYTEDYQSIEKNAQITQGDQSRKELGLGIDLLSTSMEAVNKKARVVKDEARFLLIAIQMTAEAARFRYIQNLVIKNFPNKFNSENKVIQFEVNWKKISTAIYGDAKNGVFNKDYDFGFGKVRQVKDLQMGLLMYLGKPKSSNEANSTVRHYGPLKPTLLIT

SEQ ID NO: 391 - protein, 250 aa, Artificial Sequence
  Anti-Viral Protein MAP
APTLETIASLDLNNPTTYLSFITNIRTKVADKTEQCTIQKISKTFTQRYSYIDLIVSSTQKITLAIDMADLYVLGYSDIANNKGRAFFFKDVTEAVANNFFPGATGTNRIKLTFTGSYGDLEKNGGLRKDNPLGIFRLENSIVNIYGKAGDVKKQAKFFLLAIQMVSEAARFKYISDKIPSEKYEEVTVDEYMTALENNWAKLSTAVYNSKPSTTTATKCQLATSPVTISPWIFKTVEEIKLVMGLLKSS

SEQ ID NO: 392 - protein, 293 aa, Artificial Sequence
  Shiga Toxin A-Chain
KEFTLDFSTAKTYVDSLNVIRSAIGTPLQTISSGGTSLLMIDSGTGDNLFAVDVRGIDPEEGRFNNLRLIVERNNLYVTGFVNRTNNVFYRFADFSHVTFPGTTAVTLSGDSSYTTLQRVAGISRTGMQINRHSLTTSYLDLMSHSGTSLTQSVARAMLRFVTVTAEALRFRQIQRGFRTTLDDLSGRSYVMTAEDVDLTLNWGRLSSVLPDYHGQDSVRVGRISFGSINAILGSVALILNCHHHASRVARMASDEFPSMCPADGRVRGITHNKILWDSSTLGAILMRRTISS

SEQ ID NO: 393 - protein, 319 aa, Artificial Sequence
  Shiga-Like Toxin Subunit A (Verotoxin 2)
MKCILFKWVLCLLLGFSSVSYSREFTIDFSTQQSYVSSLNSIRTEISTPLEHISQGTTSVSVINHTPPGSYFAVDIRGLDVYQARFDHLRLIIEQNNLYVAGFVNTATNTFYRFSDFTHISVPGVTTVSMTTDSSYTTLQRVAALERSGMQISRHSLVSSYLALMEFSGNTMTRDASRAVLRFVTVTAEALRFRQIQREFRQALSETAPVYTMTPGDVDLTLNWGRISNVLPEYRGEDGVRVGRISFNNISAILGTVAVILNCHHQGARSVRAVNEESQPECQITGDRPVIKINNTLWESNTAAAFLNRKSQFLYTTGK

SEQ ID NO: 394 - protein, 247 aa, Artificial Sequence
  Trichosanthin
DVSFRLSGATSSSYGVFISNLRKALPNERKLYDIPLLRSSLPGSQRYALIHLTNYADETISVAIDVTNVYIMGYRAGDTSYFFNEASATEAAKYVFKDAMRKVTLPYSGNYERLQTAAGKIRENIPLGLPALDSAITTLFYYNANSAASALMVLIQSTSEAARYKFIEQQIGKRVDKTFLPSLAIISLENSWSALSKQIQIASTNNGQFESPVVLINAQNQRVTITNVDAGVVTSNIALLLNRNNMA
